(19) United States
(12) Patent Application Publication
(10) Pub. No.: US 2022/0315934 A1
(43) Pub. Date: Oct. 6, 2022

(54) HETEROLOGOUS RIBOSOME GENERATION, ASSESSMENT AND COMPOSITIONS THEREOF

(71) Applicant: THE BROAD INSTITUTE, INC., Cambridge, MA (US)

(72) Inventors: Ahmed H. Badran, Cambridge, MA (US); Natalie Kolber, Cambridge, MA (US)

(73) Assignee: THE BROAD INSTITUTE, INC., Cambridge, MA (US)

(21) Appl. No.: 17/626,420

(22) PCT Filed: Jul. 14, 2020
(86) PCT No.: PCT/US2020/041905

§ 371 Date: Jan. 11, 2022

Related U.S. Application Data
(60) Provisional application No. 62/873,957, filed on Jul. 14, 2019.
(60) Provisional application No. 62/924,472, filed on Oct. 22, 2019.

(51) Int. Cl. C12N 15/67; C12N 15/10

(52) U.S. Cl. CPC C12N 15/67; C12N 15/1034

(57) ABSTRACT

The present disclosure relates to compositions and methods that enable enhanced monitoring and improvement of heterologous ribosome activity within a host cell. Specifically, the instant disclosure provides a reporter system that allows for improved monitoring of heterologous ribosome activity in a host cell, via engineering of both heterologous rRNA operon sequences and reporter operon sequences. New transgenic organisms harboring heterologous ribosome operons are also provided, as are methods for identifying agents capable of targeting heterologous ribosomes (e.g., ribosomes of pathogenic organisms, optionally selectively as compared to ribosomes of, e.g., commensal organisms) within a host cell.

### CROSS REFERENCE TO RELATED APPLICATIONS

[0001] This application claims the benefit of U.S. Provisional Application No. 62/873,957, filed Jul. 14, 2019, entitled “Heterologous Ribosome Generation, Assessment and Compositions Thereof,” and to U.S. Provisional Application No. 62/924,472, filed Oct. 22, 2019, also entitled “Heterologous Ribosome Generation, Assessment and Compositions Thereof.” The entire contents of the aforementioned applications are incorporated herein by reference.

### STATEMENT REGARDING FEDERALLY SPONSORED RESEARCH

[0002] This invention was made with government support under Grant No. OD024590 awarded by the National Institutes of Health and under Grant No. NNH17ZDA001N-EXO awarded by the National Aeronautics and Space Administration. The government has certain rights in the invention.

### FIELD OF THE INVENTION

[0003] The invention relates generally to compositions, methods and kits for generating, assessing, improving the activity of and/or identifying compounds that target ribosomes.

### SEQUENCE LISTING

[0004] The instant application contains a Sequence Listing which has been filed electronically in ASCII format and is hereby incorporated by reference in its entirety. Said ASCII copy, created on Jul. 14, 2020, is named 52199_542001WO_SeqLis.txt and is 3.41 MB in size. A tabulated description of sequences presented in the instant Sequence Listing is provided in FIG. 17 herein.

### BACKGROUND OF THE INVENTION

[0005] Escherichia coli (E. coli) is one of the world's best-characterized organisms. Among many advantages of working with E. coli, it can divide every 20 min in the laboratory under aerobic, nutrient-rich conditions. Pathogenic microbes tend to divide much more slowly—e.g., Syntrophobacter fumaroxidans only doubles in the laboratory every 140 hours (Harmsen et al. Int. J. Syst. Bacteriol. 48: 1383-1388). Working with pathogenic microbes also incurs significant containment costs and carries inherent safety risks.

[0006] The extraordinary catalytic capabilities of the ribosome represent a promising avenue for both synthetic biology and for identification of new, ribosome-targeting agents/therapeutics, yet the complexity and essentiality of the ribosome have hindered significant engineering efforts. Despite these limitations, the existence of extensive sequence identity among ribosomal RNAs (rRNAs) from closely related species has enabled limited heterologous rRNA evaluation in engineered E. coli strains via complementation of a genomic ribosome deficiency. However, unsuccessful rRNA complementation has thus far failed to guide the optimization of refractory ribosomes. A need exists for methods and compositions capable of enhancing generation of host cells that harbor heterologous ribosomes and for improving ribosomal activity (and assessment of such activity) in such host cells, for synthetic biology/evolution and ribosome-targeting antibiotic screening purposes, among others.

### SUMMARY OF THE INVENTION

[0007] The current disclosure relates, at least in part, to discovery and generation of an improved system that allows for assessment and evolution/improvement of heterologous ribosome activity within a host cell (optionally, a highly tractable host cell). Specifically, the instant disclosure provides a reporter system that enables monitoring of heterologous ribosome activity in a host cell, via engineering of heterologous rRNA operon sequences and reporter operon sequences. The instant disclosure has further identified that activity of a heterologous rRNA operon can be improved in a host cell by replacing intergenic sequences of the heterologous operon with corresponding host cell intergenic sequences, and that heterologous ribosome activity can be enhanced via introduction of discrete panels of heterologous r-proteins. The instant disclosure has further provided numerous heterologous rRNA-harboring genetic organisms, which enable improved screening approaches for ribosome-targeting agents and also allow for improved synthetic ribosome evolution approaches to be performed upon such cells. The instant disclosure therefore also provides screening approaches for identification of ribosome-targeting antibiotic agents, including, e.g., identification of narrow-spectrum antibiotic agents that preferentially target ribosomes of pathogenic microbes, as compared to commensal microorganisms.

[0008] In one aspect, the instant disclosure provides a method for increasing the activity and/or improving the maturation of a non-host cell ribosomal RNA (rRNA) in a host cell, where the non-host cell rRNA is encoded by a nucleic acid sequence harboring both rRNA coding sequences and intergenic sequences, the method involving replacing the intergenic sequences of the nucleic acid sequence harboring both rRNA coding sequences and intergenic sequences with intergenic sequences of the host cell, thereby increasing the activity and/or improving the maturation of the non-host cell rRNA in the host cell.

[0009] In one embodiment, the host cell is Escherichia coli. Optionally, the E. coli strain has a genomic deletion for rRNA sequences. Optionally, the E. coli strain carries a counter-selectable plasmid harboring E. coli rRNA sequences. Optionally, the E. coli strain is SQ171.

[0010] In certain embodiments, the non-host cell is Mycobacterium tuberculosis, Bifidobacterium longum, Veillonella parvula, Clostridium difficile, Bacillus subtilis, Staphylococcus aureus, Enterococcus faecium, Enterococcus faecalis, Bacteroides thetaiotaomicron, Helicobacter pylori, Desulfovibrio bastinii, Desulfovibrio vulgaris, Rickettsia parkeri, Rhodopseudomonas palustris, Caulobacter crescentus, Mariprofundus ferrooxydans, Ghiorsea bivora, Neisseria gonorrhoeae, Burkholderia cenocepacia, Bordetella pertussis, Alcaligenes faecalis, Acinetobacter baumannii, Pseudomonas aeruginosa, Marinospirillum minutulum, Alteromonas macleodii, Vibrio cholerae, Providencia stuartii, Proteus mirabilis, Serratia marcescens, Edwardsiella tarda, Enterobacter cloacae, Klebsiella oxytoca, Klebsiella pneumoniae, Klebsiella aerogenes, Citrobacter freundii, Salmonella enterica or Shigella spp. (e.g., Shigella flexneri, Shigella dysenteriae, Shigella sonnei, Shigella boydii).

[0011] In certain embodiments, the non-host cell is a commensal microbe. Optionally, the commensal microbe is of the phylum Firmicutes, Bacteroidetes, Bifidobacteria, Eubacteria, Ruminococcus, Lactobacillus, Peptococcus, Proteobacteria, Verrumicrobia, Actinobacteria, Fusobacteria or Cyanobacteria, or a combination of phyla thereof.

[0012] In another embodiment, the host cell is Bacillus subtilis. Optionally, the B. subtilis strain has a genomic deletion for rRNA sequences. Optionally, the B. subtilis strain carries a counter-selectable plasmid harboring B. subtilis rRNA sequences.

[0013] In some embodiments, the non-host cell is Mycobacterium tuberculosis, Bifidobacterium longum, Veillonella parvula, Clostridium difficile, Escherichia coli, Staphylococcus aureus, Enterococcus faecium, Enterococcus faecalis, Bacteroides thetaiotaomicron, Helicobacter pylori, Desulfovibrio bastinii, Desulfovibrio vulgaris, Rickettsia parkeri, Rhodopseudomonas palustris, Caulobacter crescentus, Mariprofundus ferrooxydans, Ghiorsea bivora, Neisseria gonorrhoeae, Burkholderia cenocepacia, Bordetella pertussis, Alcaligenes faecalis, Acinetobacter baumannii, Pseudomonas aeruginosa, Marinospirillum minutulum, Alteromonas macleodii, Vibrio cholerae, Providencia stuartii, Proteus mirabilis, Serratia marcescens, Edwardsiella tarda, Enterobacter cloacae, Klebsiella oxytoca, Klebsiella pneumoniae, Klebsiella aerogenes, Citrobacter freundii, Salmonella enterica or Shigella spp. (e.g., Shigella flexneri, Shigella dysenteriae, Shigella sonnei, Shigella boydii).

[0014] In certain embodiments, the non-host cell is Yersinia pestis, Yersinia pseudotuberculosis, Yersinia enterocolitica, Mycobacterium bovis, Mycobacterium avium, Neisseria meningitidis, Listeria monocytogenes, Streptococcus pyogenes, Campylobacter jejuni, Bacteroides fragilis, Proteus vulgaris or Haemophilus influenza.

[0015] In one embodiment, the nucleic acid sequence having both rRNA coding sequences and intergenic sequences includes non-host cell 165, 23S and 5S rRNA sequences. Optionally, the non-host cell 165, 23S and 5S rRNA sequences are under the control of an inducible promoter. Optionally, the inducible promoter is an aTc-inducible promoter or an IPTG-inducible promoter.

[0016] In a related embodiment, the host cell includes a nucleic acid sequence harboring an orthogonal-ribosome binding site (o-RBS) positioned upstream of a reporter sequence. Optionally, the reporter sequence encodes a fluorescent protein. Optionally, the fluorescent protein is a Sirius fluorescent protein, mTagBFP2, a blue fluorescent protein (BFP), Sapphire fluorescent protein, mCerulean, a yellow fluorescent protein (YFP), LSS-mKate2, MiCy, green a fluorescent protein (GFP), mEmerald, Venus, mPapaya, mScarlet-1, mCherry, mRFP, Katushka-9-5, mCarmine, mMaroon1, or E2-Crimson. Optionally, the reporter sequence encodes a chemiluminescent protein. Optionally, the chemiluminescent protein is a luciferase protein. Optionally, the nucleic acid sequence having an o-RBS positioned upstream of a reporter sequence is under the control of an inducible promoter. Optionally, the inducible promoter is an aTc-inducible promoter or an IPTG-inducible promoter. Optionally, the o-RBS reporter sequence is under the control of a PLTet0-1 or a PtetA promoter.

[0017] Optionally, the nucleic acid sequence including both rRNA coding sequences and intergenic sequences harbors a non-host cell 16S rRNA sequence that further includes an o-antiRBS sequence. (An exemplary o-antiRBS sequence is 5′-ACCACA-3′ (SEQ ID NO: 406), while a specific example of o-antiRBS-containing sequence, shown in FIG. 7A, is 5′-ATTTTTTCCAACCACAGATCT-3′ (SEQ ID NO. 407).)

[0018] In certain embodiments, non-host cell rRNA activity is increased to 50% or more of the level of an appropriate host cell rRNA activity control.

[0019] In some embodiments, growth of the host cell is improved.

[0020] An additional aspect of the instant disclosure provides a nucleic acid sequence having an aTC-inducible promoter and 165, 23S and 5S rRNA coding sequences, where the 16S sequence further harbors an o-antiRBS sequence.

[0021] Another aspect of the instant disclosure provides a rRNA reporter system that includes (a) a first nucleic acid sequence harboring an aTC-inducible promoter and 165, 23S and 5S rRNA coding sequences, where the 16S sequence further includes an o-antiRBS sequence; and (b) a second nucleic acid sequence including an o-RBS sequence and a reporter sequence.

[0022] In one embodiment, the second nucleic acid sequence includes an inducible promoter. Optionally, the inducible promoter is an IPTG-inducible promoter.

[0023] In certain embodiments, the reporter sequence encodes a green fluorescent protein (GFP), a blue fluorescent protein (BFP), a yellow fluorescent protein (YFP), luciferase or a mRFP (e.g., mCherry).

[0024] In one embodiment, the aTC-inducible promoter is a PLtetO-1 or a PtetA promoter.

[0025] In another embodiment, the rRNA reporter system further includes a third nucleic acid sequence encoding for S20, S16, S1 and/or S15 r-protein(s).

[0026] In certain embodiments, the 165, 23S and 5S rRNA coding sequences are non-E. coli sequences. Optionally, the first nucleic acid sequence further includes intergenic sequences. Optionally, the intergenic sequences are E. coli intergenic sequences. Optionally, the rRNA reporter system further includes a third nucleic acid sequence encoding for non-E. coli S20, S16, S1 and/or S15 r-protein(s) of the same organism as the non-E. coli 16S, 23S and 5S rRNA coding sequences.

[0027] Another aspect of the instant disclosure provides a host cell harboring a nucleic acid sequence having non-host cell 16S, 23S and 5S rRNA coding sequences, where the non-host cell is Mycobacterium tuberculosis, Bifidobacterium longum, Veillonella parvula, Clostridium difficile, Bacillus subtilis, Staphylococcus aureus, Enterococcus faecium, Enterococcus faecalis, Bacteroides thetaiotaomicron, Helicobacter pylori, Desulfovibrio bastinii, Desulfovibrio vulgaris, Rickettsia parkeri, Rhodopseudomonas palustris, Caulobacter crescentus, Mariprofundus ferrooxydans, Ghiorsea bivora, Neisseria gonorrhoeae, Burkholderia cenocepacia, Bordetella pertussis, Alcaligenes faecalis, Acinetobacter baumannii, Pseudomonas aeruginosa, Marinospirillum minutulum, Alteromonas macleodii, Vibrio cholerae, Providencia stuartii, Proteus mirabilis, Serratia marcescens, Edwardsiella tarda, Enterobacter cloacae, Klebsiella oxytoca, Klebsiella pneumoniae, Klebsiella aerogenes, Citrobacter freundii or Shigella spp. (e.g., Shigella flexneri, Shigella dysenteriae, Shigella sonnei, Shigella boydii).

[0028] A further aspect of the instant disclosure provides a host cell harboring a nucleic acid sequence that includes non-host cell 165, 23S and 5S rRNA coding sequences, where the non-host cell is a commensal microbe. Optionally, the commensal microbe is of one or more of the following phyla: Firmicutes, Bacteroidetes, Bifidobacteria, Eubacteria, Ruminococcus, Lactobacillus, Peptococcus, Proteobacteria, Verrumicrobia, Actinobacteria, Fusobacteria, and Cyanobacteria.

[0029] In one embodiment, the nucleic acid sequence having non-host cell 165, 23S and 5S rRNA coding sequences further includes intergenic sequences. Optionally, the intergenic sequences are host cell intergenic sequences.

[0030] In another embodiment, the non-host cell 16S rRNA sequence further includes an o-antiRBS sequence.

[0031] In an additional embodiment, the host cell further includes a nucleic acid sequence encoding for S20, S16, S1 and/or S15 r-protein(s) of the non-host cell.

[0032] In some embodiments, the host cell further includes a nucleic acid sequence harboring an orthogonal-ribosome binding site (o-RBS) positioned upstream of a reporter sequence. Optionally, the nucleic acid sequence harboring an o-RBS positioned upstream of a reporter sequence is under the control of an inducible promoter.

[0033] An additional aspect of the instant disclosure provides a method for increasing the activity of a non-host cell ribosomal RNA (rRNA) in a host cell, the method involving introducing a nucleic acid sequence encoding for S20 and/or S16 r-protein(s) of the non-host cell into the host cell, thereby increasing the activity of the non-host cell rRNA in the host cell.

[0034] In one embodiment, the method further involves introducing a nucleic acid sequence encoding for S1 and/or S15 r-protein(s) of the non-host cell into the host cell.

[0035] In certain embodiments, the host cell is Escherichia coli. Optionally, the non-host cell is Mycobacterium tuberculosis, Bifidobacterium longum, Veillonella parvula, Clostridium difficile, Bacillus subtilis, Staphylococcus aureus, Enterococcus faecium, Enterococcus faecalis, Bacteroides thetaiotaomicron, Helicobacter pylori, Desulfovibrio bastinii, Desulfovibrio vulgaris, Rickettsia parkeri, Rhodopseudomonas palustris, Caulobacter crescentus, Mariprofundus ferrooxydans, Ghiorsea bivora, Neisseria gonorrhoeae, Burkholderia cenocepacia, Bordetella pertussis, Alcaligenes faecalis, Acinetobacter baumannii, Pseudomonas aeruginosa, Marinospirillum minutulum, Alteromonas macleodii, Vibrio cholerae, Providencia stuartii, Proteus mirabilis, Serratia marcescens, Edwardsiella tarda, Enterobacter cloacae, Klebsiella oxytoca, Klebsiella pneumoniae, Klebsiella aerogenes, Citrobacter freundii, Salmonella enterica, Yersinia pestis, Yersinia pseudotuberculosis, Yersinia enterocolitica, Mycobacterium bovis, Mycobacterium avium, Neisseria meningitidis, Listeria monocytogenes, Streptococcus pyogenes, Campylobacter jejuni, Bacteroides fragilis, Proteus vulgaris, Haemophilus influenza or Shigella spp. (e.g., Shigella flexneri, Shigella dysenteriae, Shigella sonnei, Shigella boydii).

[0036] In some embodiments, the host cell is Bacillus subtilis. Optionally, the non-host cell is Mycobacterium tuberculosis, Bifidobacterium longum, Veillonella parvula, Clostridium difficile, Escherichia coli, Staphylococcus aureus, Enterococcus faecium, Enterococcus faecalis, Bacteroides thetaiotaomicron, Helicobacter pylori, Desulfovibrio bastinii, Desulfovibrio vulgaris, Rickettsia parkeri, Rhodopseudomonas palustris, Caulobacter crescentus, Mariprofundus ferrooxydans, Ghiorsea bivora, Neisseria gonorrhoeae, Burkholderia cenocepacia, Bordetella pertussis, Alcaligenes faecalis, Acinetobacter baumannii, Pseudomonas aeruginosa, Marinospirillum minutulum, Alteromonas macleodii, Vibrio cholerae, Providencia stuartii, Proteus mirabilis, Serratia marcescens, Edwardsiella tarda, Enterobacter cloacae, Klebsiella oxytoca, Klebsiella pneumoniae, Klebsiella aerogenes, Citrobacter freundii, Salmonella enterica, Yersinia pestis, Yersinia pseudotuberculosis, Yersinia enterocolitica, Mycobacterium bovis, Mycobacterium avium, Neisseria meningitidis, Listeria monocytogenes, Streptococcus pyogenes, Campylobacter jejuni, Bacteroides fragilis, Proteus vulgaris, Haemophilus influenza or Shigella spp. (e.g., Shigella flexneri, Shigella dysenteriae, Shigella sonnei, Shigella boydii).

[0037] In one embodiment, the non-host cell is A. baumannii and the nucleic acid sequence encodes for AbS20 and/or AbS16 r-protein(s).

[0038] In another embodiment, the non-host cell is A. macleodii and the nucleic acid sequence encodes for AmS20 and AmS16 r-proteins. Optionally, the nucleic acid sequence further encodes for AmS1 and/or AmS15 r-protein(s).

[0039] In an additional embodiment, the non-host cell is V. cholerae or M. minitulum and the nucleic acid sequence encodes for S20, S16, S1 and S15 r-proteins of the non-host cell.

[0040] In certain embodiments, the non-host cell is P. aeruginosa and the nucleic acid sequence encodes for PaS16 and PaS20 r-proteins. Optionally, the nucleic acid sequence further encodes for PaS1 and/or PaS15 r-protein(s).

[0041] In another embodiment, the non-host cell is A. faecalis, B. cenocepacia, N. gonnorrheae, M. ferrooxydans, or C. crescentus and the nucleic acid sequence encodes for cognate non-host cell S16 and S20 r-proteins.

[0042] In some embodiments, the nucleic acid sequence encoding for S20 and/or S16 r-proteins of the non-host cell is under the control of a copy-up variant. Optionally, the copy-up variant is RepA E93K or E93R.

[0043] In another embodiment, the host cell further includes an o-RBS reporter construct. Optionally, the reporter of the o-RBS reporter construct is under control of an IPTG-inducible promoter.

[0044] In one embodiment, a nucleic acid sequence harboring non-host cell 16S, 23S and 5S rRNA sequences expresses the non-host cell rRNA in the host cell. Optionally, the non-host cell 16S, 23S and 5S rRNA sequences are under the control of an inducible promoter. Optionally, the inducible promoter is an aTc-inducible promoter or an IPTG-inducible promoter. Optionally, the host cell includes a nucleic acid sequence harboring an orthogonal-ribosome binding site (o-RBS) positioned upstream of a reporter sequence. Optionally, the nucleic acid sequence harboring an o-RBS positioned upstream of a reporter sequence is under the control of an inducible promoter. Optionally, the inducible promoter is an aTc-inducible promoter or an IPTG-inducible promoter.

[0045] In another embodiment, the nucleic acid sequence having non-host cell 16S, 23S and 5S rRNA sequences includes a non-host cell 16S rRNA sequence further including an o-antiRBS sequence.

[0046] In certain embodiments, non-host cell rRNA activity is increased to 50% or more of the level of an appropriate host cell rRNA control.

[0047] In some embodiments, growth of the host cell is improved.

[0048] In a further aspect, the instant disclosure provides a method for identifying a compound capable of modulating the rRNA activity of a pathogenic microbe in a host cell, where the host cell includes (i) a rRNA reporter system having a first nucleic acid sequence harboring 165, 23S and 5S rRNA coding sequences, where the 16S sequence further includes an o-antiRBS sequence; and (ii) a second nucleic acid sequence having an o-RBS sequence and a reporter sequence, the method involving: (a) contacting the host cell with a test compound; and (b) measuring modulation of the reporter sequence in the presence of the test compound, as compared to an appropriate control, thereby identifying the test compound as a compound capable of modulating the rRNA activity of a pathogenic microbe in the host cell.

[0049] In certain embodiments, the appropriate control is the rRNA activity of a commensal microbe. Optionally, the rRNAs of pathogenic and commensal microbes are multiplexed in the host cell.

[0050] In one embodiment, the test compound reduces pathogenic microbe rRNA activity.

[0051] In another embodiment, the test compound, when administered to the pathogenic microbe, reduces growth of the pathogenic microbe.

[0052] In certain embodiments, the test compound is a small molecule.

[0053] In some embodiments, the host cell further includes a nucleic acid sequence encoding for S20, S16, S1 and/or S15 r-protein(s) of the pathogenic microbe.

[0054] In another embodiment, the first nucleic acid sequence harboring 165, 23S and 5S rRNA coding sequences further includes intergenic sequences. Optionally, the intergenic sequences are host cell intergenic sequences.

[0055] In one embodiment, the test compound selectively modulates the rRNA activity of the pathogenic microbe in the host cell, as compared to modulation of rRNA activity of a commensal microbe in the host cell.

[0056] In some embodiments, a test compound which preferentially inhibits the rRNA activity of a pathogenic microbe as compared to the rRNA activity of a commensal microbe is selected for administration to a subject having or at risk of having the pathogenic microbe.

[0057] In another aspect, the instant disclosure provides a method for identifying a compound that does not modulate or only weakly modulates (as compared to a pathogenic microbe) the rRNA activity of a commensal microbe in a host cell having (i) a rRNA reporter system harboring a first nucleic acid sequence including 16S, 23S and 5S rRNA coding sequences, where the 16S sequence further includes an o-antiRBS sequence and (ii) a second nucleic acid sequence harboring an o-RBS sequence and a reporter sequence, the method involving: (a) contacting the host cell with a test compound; and (b) measuring modulation of the reporter sequence in the presence of the test compound, as compared to an appropriate control, thereby identifying the test compound as a compound that does not modulate or only weakly modulates (as compared to a pathogenic microbe) the rRNA activity of the commensal microbe in the host cell.

[0058] Another aspect of the instant disclosure provides an E. coli cell harboring mutated forms of 23S rRNA genes rrlA, rrlB, rrlC, rrlD, rrlE, rrlG and rrlH.

[0059] In embodiments, the E. coli cell further comprises a superfolder GFP (sfGFP) reporter.

[0060] In certain embodiments, at least one 23S rRNA gene of E. coli cell genes rrlA, rrlB, rrlC, rrlD, rrlE, rrlG and rrlH harbors an A2058U mutation.

[0061] In embodiments, the E. coli cell is erythromycin-resistant.

[0062] In some embodiments, the E. coli cell further includes an orthogonal large subunit ribosome and/or an orthogonal small subunit ribosome.

[0063] Another aspect of the instant disclosure provides a method for identifying the presence and/or extent of association between an orthogonal SSU and a host cell LSU, the method involving: contacting a host cell of the disclosure having a host cell LSU and harboring a nucleic acid sequence that encodes for an orthogonal SSU capable of being expressed in the host cell, contacting the host cell harboring the orthogonal SSU with erythromycin; and observing the erythromycin sensitivity of the host cell harboring the orthogonal SSU, where: (a) erythromycin sensitivity of the host cell harboring the orthogonal SSU indicates high levels of exchange between the orthogonal SSU and the host cell LSU; and (b) erythromycin resistance of the host cell harboring the orthogonal SSU indicates low levels of exchange between the orthogonal SSU and the host cell LSU (i.e., the orthogonal SSU preferentially associates with the host cell LSU), thereby identifying association between the orthogonal SSU and the host cell LSU.

[0064] In one embodiment, the host cell is an E. coli cell.

[0065] An additional aspect of the instant disclosure provides a method for enhancing translation in a host cell of an orthogonal nucleic acid harboring a reporter sequence, where the reporter sequence has a 5′ end and a 3′ end, the method involving attaching a sfGFP sequence at the 5′ end of the reporter sequence, thereby enhancing translation of the orthogonal nucleic acid sequence in the host cell.

[0066] In one embodiment, the sfGFP sequence includes or is a sequence encoding for SEQ ID NO: 409 (N-MSKGEELFTG-C). Optionally, the sfGFP sequence includes or is SEQ ID NO: 408 (5′-ATGAGCAAAGGTGAAGAACTGTTTACCGGC-3′).

[0067] A further aspect of the instant disclosure provides a nucleic acid sequence that includes a first sequence having an o-antiRBS sequence, the first sequence being operably linked to a second sequence that includes a sfGFP sequence having a 5′ and a 3′ end, where the 3′ end of the sfGFP sequence is attached to the 5′ end of a reporter nucleic acid sequence having a 5′ and a 3′ end.

[0068] In one embodiment, the reporter nucleic acid sequence encodes a fluorescent protein. Optionally, the fluorescent protein is a Sirius fluorescent protein, mTagBFP2, a blue fluorescent protein (BFP), a Sapphire fluorescent protein, mCerulean, a yellow fluorescent protein (YFP), LSS-mKate2, MiCy, a green fluorescent protein (GFP) (optionally, a superfolder green fluorescent protein (sfGFP)), mEmerald, Venus, mPapaya, mScarlet-1, mCherry, mRFP, Katushka-9-5, mCarmine, mMaroon1, or E2-Crimson.

[0069] In another embodiment, the reporter nucleic acid sequence encodes a chemiluminescent protein. Optionally, the chemiluminescent protein is a luciferase protein.

### Definitions

[0070] The term “host cell” is used herein to denote any cell, wherein any foreign or exogenous genetic material has been introduced. In its broadest sense, “host cell” is used to denote a cell which has been genetically manipulated. In certain embodiments, “host cell” refers to a microbe, optionally a prokaryotic cell, optionally a tractable prokaryotic cell (e.g., E. coli, B. subtilis, etc.).

[0071] As used herein, “heterologous sequence” or “heterologous protein” (e.g., heterologous ribosome) means any sequence or protein other than the one that naturally occurs within a host cell (optionally, in a host cell that has not been genetically modified). In certain embodiments, a heterologous sequence or protein is one for which a corresponding homologous sequence or protein exists within an unmodified host cell.

[0072] As used herein, the term “pathogenic microbe” refers to a biological microorganism that is capable of producing an undesirable effect upon a host animal, and includes, for example, without limitation, bacteria, viruses, bacterial spores, molds, mildews, fungi, and the like. This includes all such biological microorganisms, regardless of their origin or of their method of production, and regardless of whether they exist in facilities, in munitions, weapons, or elsewhere. In certain embodiments, the pathogenic microbe of the instant disclosure is a pathogenic bacteria.

[0073] As used herein, the term “commensal microbe” refers to a biological microorganism that lives on or in another organism without causing harm. A commensal microbe may refer, without limitation, to bacteria, viruses, fungi, and the like. The term therefore includes all such biological microorganisms, regardless of their origin or of their method of production, and regardless of where they exist. In certain embodiments, the commensal microbe of the instant disclosure is a commensal bacteria.

[0074] As used herein, the term “reporter gene” or “reporter nucleic acid” sequence (including “reporter sequence” where reference to a nucleic acid sequence is clear) refers to genes or nucleic acid sequences that enable the detection or measurement of gene expression. Reporter genes and/or reporter nucleic acid sequences may be recombined with regulatory sequences and/or genes of interest, e.g., to report expression, location and/or levels. In some embodiments of the present disclosure, the reporter nucleic acid sequence(s) is a gene encoding a fluorescent or chemiluminescent protein. In some embodiments, a “tag” sequence of the superfolder GFP nucleic acid sequence (“sfGFP” tag nucleic acid sequence is 5′-ATGAGCAAAGGTGAAGAACTGTTTACCGGC-3′ (SEQ ID NO: 408), which encodes for amino acid sequence N-MSKGEELFTG-C(SEQ ID NO: 409)) is employed, as the sfGFP tag sequence was surprisingly identified to enhance the translation of other associated proteins in a host cell.

[0075] Unless specifically stated or obvious from context, as used herein, the term “about” is understood as within a range of normal tolerance in the art, for example within 2 standard deviations of the mean. “About” can be understood as within 10%, 9%, 8%, 7%, 6%, 5%, 4%, 3%, 2%, 1%, 0.5%, 0.1%, 0.05%, or 0.01% of the stated value.

[0076] In certain embodiments, the term “approximately” or “about” refers to a range of values that fall within 25%, 20%, 19%, 18%, 17%, 16%, 15%, 14%, 13%, 12%, 11%, 10%, 9%, 8%, 7%, 6%, 5%, 4%, 3%, 2%, 1%, or less in either direction (greater than or less than) of the stated reference value unless otherwise stated or otherwise evident from the context (except where such number would exceed 100% of a possible value).

[0077] Unless otherwise clear from context, all numerical values provided herein are modified by the term “about.”

[0078] By “control” or “reference” is meant a standard of comparison. In one aspect, as used herein, “changed as compared to a control” sample or subject is understood as having a level that is statistically different than a sample from a normal, untreated, or control sample. Control samples include, for example, cells in culture, one or more laboratory test animals, or one or more human subjects. Methods to select and test control samples are within the ability of those in the art. Determination of statistical significance is within the ability of those skilled in the art, e.g., the number of standard deviations from the mean that constitute a positive result.

[0079] The terms “isolated,” “purified,” or “biologically pure” refer to material that is free to varying degrees from components which normally accompany it as found in its native state. “Isolate” denotes a degree of separation from original source or surroundings. “Purify” denotes a degree of separation that is higher than isolation.

[0080] By “homologous sequence” is meant a nucleotide sequence that is shared by one or more polynucleotide sequences, such as genes, gene transcripts and/or non-coding polynucleotides. For example, a homologous sequence can be a nucleotide sequence that is shared by two or more genes encoding related but different proteins, such as different members of a gene family, different protein epitopes, different protein isoforms or completely divergent genes, such as a cytokine and its corresponding receptors. A homologous sequence can be a nucleotide sequence that is shared by two or more non-coding polynucleotides, such as noncoding DNA or RNA, regulatory sequences, introns, and sites of transcriptional control or regulation. Homologous sequences can also include conserved sequence regions shared by more than one polynucleotide sequence. Homology does not need to be perfect homology (e.g., 100%), as partially homologous sequences are also contemplated by the instant disclosure (e.g., 99%, 98%, 97%, 96%, 95%, 94%, 93%, 92%, 91%, 90%, 89%, 88%, 87%, 86%, 85%, 84%, 83%, 82%, 81%, 80% etc.). Indeed, design and use of the nucleotide sequences of the instant disclosure contemplates the possibility of using nucleotide sequences that are, e.g., only 99%, 98%, 97%, 96%, 95%, 94%, 93%, 92%, 91%, 90%, 89%, 88%, 87%, 86%, 85%, 84%, 83%, 82%, 81%, 80% etc. homologous to nucleotide sequences recited herein. Indeed, it is contemplated that nucleotide sequences with insertions, deletions, and single point mutations relative to the specific sequences disclosed herein can also be effective, e.g., for use in nucleic acid constructs (and in certain embodiments, in encoded polypeptide sequences) of the instant disclosure. In addition, it is expressly contemplated that nucleotide and/or amino acid sequences with analog substitutions or insertions can also be employed.

[0081] Sequence identity may be determined by sequence comparison and alignment algorithms known in the art. To determine the percent identity of two nucleic acid sequences (or of two amino acid sequences), the sequences are aligned for comparison purposes (e.g., gaps can be introduced in the first sequence or second sequence for optimal alignment). The nucleotides (or amino acid residues) at corresponding nucleotide (or amino acid) positions are then compared. When a position in the first sequence is occupied by the same residue as the corresponding position in the second sequence, then the molecules are identical at that position. The percent identity between the two sequences is a function of the number of identical positions shared by the sequences (i.e., % homology=# of identical positions/total # of positions×100), optionally penalizing the score for the number of gaps introduced and/or length of gaps introduced.

[0082] The comparison of sequences and determination of percent identity between two sequences can be accomplished using a mathematical algorithm. In one embodiment, the alignment generated over a certain portion of the sequence aligned having sufficient identity but not over portions having low degree of identity (i.e., a local alignment). A preferred, non-limiting example of a local alignment algorithm utilized for the comparison of sequences is the algorithm of Karlin and Altschul (1990) Proc. Natl. Acad. Sci. USA 87:2264-68, modified as in Karlin and Altschul (1993) Proc. Natl. Acad. Sci. USA 90:5873-77. Such an algorithm is incorporated into the BLAST programs (version 2.0) of Altschul, et al. (1990) J. Mol. Biol. 215:403-10.

[0083] In another embodiment, a gapped alignment, the alignment is optimized by introducing appropriate gaps, and percent identity is determined over the length of the aligned sequences (i.e., a gapped alignment). To obtain gapped alignments for comparison purposes, Gapped BLAST can be utilized as described in Altschul et al., (1997) Nucleic Acids Res. 25(17):3389-3402. In another embodiment, a global alignment the alignment is optimized by introducing appropriate gaps, and percent identity is determined over the entire length of the sequences aligned. (i.e., a global alignment). A preferred, non-limiting example of a mathematical algorithm utilized for the global comparison of sequences is the algorithm of Myers and Miller, CABIOS (1989). Such an algorithm is incorporated into the ALIGN program (version 2.0) which is part of the GCG sequence alignment software package. When utilizing the ALIGN program for comparing amino acid sequences, a PAM120 weight residue table, a gap length penalty of 12, and a gap penalty of 4 can be used.

[0084] Unless specifically stated or obvious from context, as used herein, the term “or” is understood to be inclusive. Unless specifically stated or obvious from context, as used herein, the terms “a”, “an”, and “the” are understood to be singular or plural.

[0085] Ranges can be expressed herein as from “about” one particular value, and/or to “about” another particular value. When such a range is expressed, another aspect includes from the one particular value and/or to the other particular value. Similarly, when values are expressed as approximations, by use of the antecedent “about,” it is understood that the particular value forms another aspect. It is further understood that the endpoints of each of the ranges are significant both in relation to the other endpoint, and independently of the other endpoint. It is also understood that there are a number of values disclosed herein, and that each value is also herein disclosed as “about” that particular value in addition to the value itself. It is also understood that throughout the application, data are provided in a number of different formats and that this data represent endpoints and starting points and ranges for any combination of the data points. For example, if a particular data point “10” and a particular data point “15” are disclosed, it is understood that greater than, greater than or equal to, less than, less than or equal to, and equal to 10 and 15 are considered disclosed as well as between 10 and 15. It is also understood that each unit between two particular units are also disclosed. For example, if 10 and 15 are disclosed, then 11, 12, 13, and 14 are also disclosed.

[0086] Ranges provided herein are understood to be shorthand for all of the values within the range. For example, a range of 1 to 50 is understood to include any number, combination of numbers, or sub-range from the group consisting 1, 2, 3, 4, 5, 6, 7, 8, 9, 10, 11, 12, 13, 14, 15, 16, 17, 18, 19, 20, 21, 22, 23, 24, 25, 26, 27, 28, 29, 30, 31, 32, 33, 34, 35, 36, 37, 38, 39, 40, 41, 42, 43, 44, 45, 46, 47, 48, 49, or 50 as well as all intervening decimal values between the aforementioned integers such as, for example, 1.1, 1.2, 1.3, 1.4, 1.5, 1.6, 1.7, 1.8, and 1.9. With respect to sub-ranges, “nested sub-ranges” that extend from either end point of the range are specifically contemplated. For example, a nested sub-range of an exemplary range of 1 to 50 may comprise 1 to 10, 1 to 20, 1 to 30, and 1 to 40 in one direction, or 50 to 40, 50 to 30, 50 to 20, and 50 to 10 in the other direction.

[0087] The transitional term “comprising,” which is synonymous with “including,” “containing,” or “characterized by,” is inclusive or open-ended and does not exclude additional, unrecited elements or method steps. By contrast, the transitional phrase “consisting of” excludes any element, step, or ingredient not specified in the claim. The transitional phrase “consisting essentially of” limits the scope of a claim to the specified materials or steps “and those that do not materially affect the basic and novel characteristic(s)” of the claimed invention.

[0088] Other features and advantages of the disclosure will be apparent from the following description of the preferred embodiments thereof, and from the claims. Unless otherwise defined, all technical and scientific terms used herein have the same meaning as commonly understood by one of ordinary skill in the art to which this disclosure belongs. Although methods and materials similar or equivalent to those described herein can be used in the practice or testing of the present disclosure, suitable methods and materials are described below. All published foreign patents and patent applications cited herein are incorporated herein by reference. All other published references, documents, manuscripts and scientific literature cited herein are incorporated herein by reference. In the case of conflict, the present specification, including definitions, will control. In addition, the materials, methods, and examples are illustrative only and not intended to be limiting.

### BRIEF DESCRIPTION OF THE DRAWINGS

[0089] The following detailed description, given by way of example, but not intended to limit the disclosure solely to the specific embodiments described, may best be understood in conjunction with the accompanying drawings, in which:

[0090] FIGS. 1A to 1C show the assessment of heterologous rRNA activity via SQ171 complementation. FIG. 1A shows a schematic representation of the SQ171 complementation assay. SQ171 E. coli cells lack all 7 genomic rRNA operons and maintain a single rrnC operon on a SacB counter-selectable plasmid. Introduction of a heterologous rRNA (rrnX) and depletion of the E. coli rrnC plasmid using sucrose yielded cells that relied upon the heterologous ribosome for survival. FIG. 1B shows the growth time course of SQ171 cells bearing increasingly divergent heterologous rRNAs (n=2-8). FIG. 1C shows the correlation between heterologous 16S rRNA sequence identity to E. coli (%) and SQ171 fitness (doublings per hour) upon complementation (99% CI, R2=0.62) (n=1-8). E. coli rRNA control plotted in gray. Data represent the mean and standard deviation of 1-8 biological replicates. Complete SQ171 complementation data is reported in FIG. 14 below.

[0091] FIGS. 2A to 2F show the quantification of heterologous rRNA function using orthogonal translation. FIG. 2A shows a schematic representation of the orthogonal translation circuit. A superfolder GFP (sfGFP) reporter incorporated an o-RBS exclusively recognized by ribosomes that encoded the complementary o-antiRBS, yielding a quantifiable fluorescent readout for heterologous ribosome activity. FIG. 2B shows the comparison of wt-antiRBS and o-antiRBS E. coli ribosomes translating the o-RBS sfGFP reporter (n=5). FIG. 2C shows the inducer dependence of the orthogonal translation circuit (n=2). FIG. 2D shows the heterologous rRNA activities of 34 rRNA operons in addition to the E. coli o-rRNA control as quantified by orthogonal translation (n=8). FIG. 2E shows the correlation between 16S rRNA sequence identity to E. coli (%) and activity in the o-translation genetic circuit (normalized to E. coli o-rRNA) for 15 functional heterologous o-rRNAs (mean activity ≥5%), illustrating a correlation between orthogonal translation activity and 16S identity (99% CI, R2=0.79, n=8). FIG. 2F shows the correlation between activity in the orthogonal translation circuit and fitness in SQ171 strain complementation assays for 21 heterologous rRNAs in addition to E. coli, illustrating a linear relationship (99% CI, R2=0.47, n=1-8). E. coli rRNA controls plotted in gray. Data reflect the mean and standard deviation of 1-8 biological replicates. Comprehensive SQ171 complementation and o-translation data reported in FIG. 14 below.

[0092] FIGS. 3A to 3E show the effects of o-rRNA intergenic sequence replacement on heterologous translation. FIG. 3A shows the per-base sequence conservation across 34 evaluated rRNA operons, demonstrating limited conservation in intergenic regions as compared to structural rRNA genes. FIG. 3B shows a schematic representation of the intergenic sequence replacement strategy. FIG. 3C shows the effects of intergenic sequence replacement on o-rRNAs with high 16S rRNA sequence identity to E. coli (96.2-99.6%), as well as A. macleodii (85.9%), illustrating a minimal effect on orthogonal translation (n=8). FIG. 3D shows the effects of intergenic sequence replacement on o-rRNAs with intermediate 16S rRNA sequence identity to E. coli (81.5-97.4%), illustrating a significant effect on intergenic sequence replacement (n=8). FIG. 3E shows the correlation between activity in the o-translation circuit and fitness in SQ171 strain complementation assays for 21 rRNAs evaluated after intergenic sequence replacement, illustrating a linear relationship. E. coli rRNA control plotted in gray (99% CI, R2=0.84, n=3-8). Data reflect the mean and standard deviation of 3-8 biological replicates. Comprehensive SQ171 complementation and o-translation data are reported in FIG. 14 below.

[0093] FIGS. 4A to 4F show that cognate r-proteins complementation improved heterologous o-rRNA activity. FIG. 4A shows a schematic representation of natural r-protein genomic organization for a given microbial genome and corresponding plasmid architecture for heterologous o-rRNA complementation. FIG. 4B shows that A. baumannii AO1 enhanced cognate heterologous rRNA activity (n=4-12). FIG. 4C shows that A. baumannii S20 and S16 enhanced A. baumannii o-ribosome activity to levels comparable to E. coli o-ribosomes. FIG. 4D shows that A. macleodii AO1 similarly improved cognate heterologous rRNA activity (n=8-12). AO2 was expressed with L19 deleted due to observed toxicity (see FIGS. 10A and 10B below, n=8-12). FIG. 4E shows that cognate S1 or S15, alongside S20 and S16, maximized A. macleodii o-ribosome activity (n=8-16). FIG. 4F shows cognate S20, S16, S1, and S15 supplementation alongside cognate heterologous o-rRNAs. Toxicity was observed when expressing the four proteins together in A. macleodii and A. baumannii (FIG. 11A, n=8). Data reflect the mean and standard deviation of 4-16 biological replicates. Comprehensive o-translation data is reported in FIG. 14 below.

[0094] FIGS. 5A to 5F show that phylogenetically-guided determination of cognate r-proteins improved highly divergent heterologous o-ribosomes in E. coli. FIG. 5A shows that no single contiguous operon significantly improved translation activity of o-rRNAs derived from B. cenocepacia (n=8). FIG. 5B shows that no single contiguous operon significantly improved translation activity of o-rRNAs derived from R. parkeri (n=8). FIG. 5C shows that no single contiguous operon significantly improved translation activity of o-rRNAs derived from E. faecalis (n=4). FIG. 5D shows that only 2 of the identified 5 regions with high sequence divergence between E. coli and E. faecalis 16S rRNAs abrogated E. coli o-translation when replaced with cognate E. faecalis sequences (n=4). FIG. 5E shows that cognate S2, S8, S18, S12, 520, S16, and S17 (which directly contacted h9, h10, and h262) allowed for a significant increase in E. faecalis o-rRNA translation. Further analysis showed that S8 and S18 were not required for this increase in activity (n=4). FIG. 5F shows that r-proteins S2, S12, 520, S16, and S17 collectively improved cognate o-rRNA translation for highly divergent species, but were not as effective as S20 and S16 alone for less divergent species. E. faecalis cognate r-proteins were expressed from a low copy number backbone (WT RepA SC101 origin) to limit toxicity (n=8). Data reflect the mean and standard deviation of 4-8 biological replicates. Comprehensive o-translation data is reported in FIG. 14 below.

[0095] FIGS. 6A to 6G show benchmarking and extension of the orthogonal reporter system. FIG. 6A shows that the induction of E. coli o-rRNA did not have a significant effect on host growth rate (for OD, n=5; for sfGFP, n=2). FIG. 6B shows that the o-sfGFP (34) reporter used throughout this study demonstrated robust signal-to-noise upon o-rRNA induction, n=5. FIGS. 6C to 6E show that additional orthogonal reporters demonstrated dynamic ranges comparable to or exceeding that of sfGFP. FIG. 6C shows that Photorhabdus luminescens xluxAB (48) demonstrated a dynamic range exceeding that of sfGFP, n=8. FIG. 6D shows that mTagBFP2 (55) demonstrated a dynamic range comparable to that of sfGFP, n=8. FIG. 6E shows that Venus (56) demonstrated a dynamic range comparable to that of sfGFP, n=8. Conversely, an orthogonal reporter incorporating mCherry (57) showed low signal-to-noise. FIG. 6F shows that replacement of successive codons at the mCherry N-terminus with their sfGFP counterparts yielded a gradual improvement in signal, n=8. FIG. 6G shows that replacement of successive codons at the mCherry N-terminus with their sfGFP counterparts yielded a gradual improvement in dynamic range, n=8. FIG. 6H shows a refactored mCherry orthogonal reporter in which the first 10 codons were replaced with the cognate sfGFP and in which the signal had significantly improved dynamic range, n=8. Data reflect the mean and standard deviation of 2-8 biological replicates.

[0096] FIGS. 7A to 7P show that a sfGFP-derived leader sequence improved the function of orthogonal reporters. FIG. 7A shows a schematic illustrating the O-antiRBS, 10-aa sfGFP-derived tag, and N-terminus of a fluorescent protein. Sequences shown for the O-antiRBS and sfGFP-derived tags are: o-antiRBS: 5′-ACCACA-3′ (SEQ ID NO: 406), with indicated full flanking sequence, 5′-ATTTTTTCCAACCACAGATCT-3′ (SEQ ID NO: 407); and sfGFP-derived tag: 5′-ATGAGCAAAGGTGAAGAACTGTTTACCGGC-3′ (SEQ ID NO: 408), which encodes for N-MSKGEELFTG-C(SEQ ID NO: 409). When appended to the N-terminus of 15 fluorescent proteins, the tag affected orthogonal translation of the reporter. FIG. 7B shows the translation of Sirius (58) with and without the sfGFP leader in the presence of 0 and 1000 ng/ml aTC. FIG. 7C shows the translation of mTagBFP2 (55) with and without the sfGFP leader in the presence of 0 and 1000 ng/ml aTC. FIG. 7D shows the translation of mCerulean (59) with and without the sfGFP leader in the presence of 0 and 1000 ng/ml aTC. FIG. 7E shows the translation of MiCy (60) with and without the sfGFP leader in the presence of 0 and 1000 ng/ml aTC. FIG. 7F shows the translation of mEmerald (61) with and without the sfGFP leader in the presence of 0 and 1000 ng/ml aTC. FIG. 7G shows the translation of Sapphire (61) with and without the sfGFP leader in the presence of 0 and 1000 ng/ml aTC. FIG. 7H shows the translation of Venus (56) with and without the sfGFP leader in the presence of 0 and 1000 ng/ml aTC. FIG. 7I shows the translation of mPapaya (62) with and without the sfGFP leader in the presence of 0 and 1000 ng/ml aTC. FIG. 7J shows the translation of mScarlet-I (63) with and without the sfGFP leader in the presence of 0 and 1000 ng/ml aTC. FIG. 7K shows the translation of LSS-mKate2 (64) with and without the sfGFP leader in the presence of 0 and 1000 ng/ml aTC. FIG. 7L shows the translation of mCherry (57) with and without the sfGFP leader in the presence of 0 and 1000 ng/ml aTC. FIG. 7M shows the translation of Katusha-9-5 (65) with and without the sfGFP leader in the presence of 0 and 1000 ng/ml aTC. FIG. 7N shows the translation of E2-Crimson (66) with and without the sfGFP leader in the presence of 0 and 1000 ng/ml aTC. FIG. 7O shows the translation of mMaroon1 (67) with and without the sfGFP leader in the presence of 0 and 1000 ng/ml aTC. FIG. 7P shows the translation of mCarmine (68) with and without the sfGFP leader in the presence of 0 and 1000 ng/ml aTC. Generally, addition of the leader tag led to an improvement in absolute signal (average improvement 2.7-fold) and/or dynamic range (average improvement 1.5-fold). Data reflect the mean and standard deviation of 8 biological replicates.

[0097] FIG. 8 shows that divergent o-rRNA activities were not improved following intergenic sequence replacement. A comparison of o-sfGFP translation activity before and after intergenic sequence replacement for o-rRNAs derived from increasingly divergent microorganisms (69.8-82.3% 16S rRNA sequence identity to E. coli) is shown, wherein limited improvement was observed following intergenic sequence replacement. Data reflect the mean and standard deviation of 8 biological replicates. Comprehensive o-translation data is reported in FIG. 14 below.

[0098] FIGS. 9A to 9E show that protein supplementation significantly improved A. baumannii o-rRNA function. FIG. 9A shows A. baumannii heterologous o-rRNA activity was improved following AO1 induction, yielding comparable activity levels as supplementation with all cognate SSU r-proteins (S1-S21; n=4). FIG. 9B shows A. baumannii heterologous o-rRNA activity improvement further depended upon AO1 copy number, indicating insufficient r-protein production at low copy numbers. Labels indicate RepA genotypes and numbers in parentheses indicate the corresponding copy numbers (41) (n=4). FIG. 9C shows single r-protein deletion from AO1 did not adversely affect A. baumannii heterologous o-rRNA activity, indicating that more than a single r-protein on this plasmid complemented o-rRNA function, n=4. FIG. 9D shows that o-sfGFP production using an E. coli o-rRNA was inversely proportional to mCherry production using E. coli native ribosomes, indicating that r-protein overexpression had pleiotropic effects on o-ribosome activity (99% CI, R2=0.73, n=8). FIG. 9E shows E. coli o-rRNA regulation by P_{LtetO-1} (69) and PtetA. Improved signal and reduced variability was observed with PtetA, the native promoter found in the Tn10 transposon. P_{LtetO-1}-dependent variability was a result of promoter recombination between identical TetR operators (not shown) during cell passaging, n=32. Data reflect the mean and standard deviation of 4-32 biological replicates.

[0099] FIGS. 10A to 10E demonstrate the dissection of large subunit (LSU) r-proteins that improved A. macleodii o-rRNA activity. FIG. 10A shows that single r-proteins (from AO2) expressed alongside cognate A. macleodii o-rRNA revealed that L19 was responsible for the observed toxicity from AO2, where removal of L19 (AO2 ΔL19) mitigated a significant fraction of the observed growth reduction. FIG. 10B shows that no single r-protein from AO2 significantly enhanced A. macleodii o-rRNA activity. FIG. 10C shows that single deletions from AO2 did not reveal any variants that differed significantly in effect on o-rRNA activity. FIG. 10D shows that truncation variants from the 5′ end of the artificial operon did not reveal any variants that differed significantly in effect on o-rRNA activity. FIG. 10E shows that truncation variants from the 3′ end of the artificial operon did not reveal any variants that differed significantly in effect on o-rRNA activity. These data collectively suggested that the observed improvement relied on the concerted action of numerous r-proteins from AO2. Data reflect the mean and standard deviation of 8 biological replicates.

[0100] FIGS. 11A to 11C show dissection of the contributions of the identified r-proteins 520, S16, S1, and S15. FIG. 11A Expression of cognate S20, S16, S1, and S15 combinations alongside numerous heterologous o-rRNAs. A. macleodii and A. baumannii cognate S20, S16, S1, and S15 limit the growth of the E. coli host when co-expressed, as indicated by culture density after overnight growth, whereas most other r-proteins evaluated are well tolerated. NT=not tested. b) Both cognate r-proteins S20 and S16 are necessary for maximal sfGFP expression using o-rRNAs from more divergent microorganisms: N. gonorrheae (81.8% 16S rRNA sequence identity to E. coli), M. ferrooxydans (80.1%), and C. crescentus (79.3%). However, S20 and S16 are functionally redundant when expressed alongside more related o-rRNAs to E. coli. c) The combination of S20, S16, S1, and S15 is necessary for maximal activity using V. cholerae (90.3% 16S identity to E. coli) and M. minutulum (85.3%) o-rRNAs. For more phylogenetically distant o-rRNAs, no additional improvement is observed upon supplementation with S1 or S15 beyond the effect of S20 and S16. Data reflect the mean and standard deviation of 8 biological replicates. Comprehensive o-translation data reported in FIG. 14 below.

[0101] FIG. 12 shows that E. faecalis 16S rRNA helices have low sequence similarity to those of E. coli. E. faecalis and E. coli rRNAs were aligned using Clustal Omega with default parameters (43), and regions with low sequence identity were manually identified. Elements that were later transplanted into the E. coli 16S o-rRNA are identified in blue.

[0102] FIGS. 13A to 13N show the sequence similarity between the r-proteins of species evaluated in this study and those of E. coli. R-proteins identified as enhancing o-rRNA activity are highlighted in blue. FIG. 13A shows the sequence similarity between r-proteins of V. cholera and that of E. coli. FIG. 13B shows the sequence similarity between r-proteins of A. macleodii cholera and that of E. coli. FIG. 13C shows the sequence similarity between r-proteins of M. minutulum cholera and that of E. coli. FIG. 13D shows the sequence similarity between r-proteins of P. aeruginosa cholera and that of E. coli. FIG. 13E shows the sequence similarity between r-proteins of A. baumannii cholera and that of E. coli. FIG. 13F shows the sequence similarity between r-proteins of A. faecalis cholera and that of E. coli. FIG. 13G shows the sequence similarity between r-proteins of N. gonorrhoeae cholera and that of E. coli. FIG. 13H shows the sequence similarity between r-proteins of B. pertussis cholera and that of E. coli. FIG. 13I shows the sequence similarity between r-proteins of B. cenocepacia cholera and that of E. coli. FIG. 13J shows the sequence similarity between r-proteins of M. ferroxydans cholera and that of E. coli. FIG. 13K shows the sequence similarity between r-proteins of C. crescentus cholera and that of E. coli. FIG. 13L shows the sequence similarity between r-proteins of R. parkeri cholera and that of E. coli. FIG. 13M shows the sequence similarity between r-proteins of E. faecalis cholera and that of E. coli. FIG. 13N shows the average r-protein sequence similarity to E. coli for species evaluated in this study which were not immediately functional in E. coli prior to r-protein complementation. Protein sequences were identified via BLAST to E. coli sequences (see Example 1 below). Note that in some cases multiple homologs were identified or a full complement of r-proteins was not identified.

[0103] FIG. 14 shows a summary of heterologous translation data. Doubling times in SQ171 cells (minutes) and orthogonal translation activity (normalized to orthogonal E. coli) for all heterologous ribosomes tested. “nIS” indicates native intergenic sequences. “EcIS” indicates E. coli intergenic sequences. “NA” indicates not applicable. “NT” indicates not tested. “*” indicates N=1; only one colony was obtained by SQ171 complementation passing Kan counterscreening against pCSacB. Otherwise, data reflect mean and standard deviation of 3-8 biological replicates.

[0104] FIG. 15 shows the excitation and emission wavelengths of the fluorescent protein reporters employed infra. Highlighted plasmids have been deposited in Addgene.

[0105] FIG. 16 shows the species names and Genome Taxonomy Database (GTDB) representative genomes used to construct the phylogenetic tree of the instant disclosure (see FIG. 2D above).

[0106] FIG. 17 provides descriptive information regarding the accompanying Sequence Listing.

[0107] FIGS. 18A to 18E show the assessment of E. coli and heterologous ribosome subunit association using the erythromycin-dependent reporter system. FIG. 18A shows the development of the erythromycin-resistant E. coli strain S4246. All 7 rrl (A-H) 23S rRNA genes were mutated (A2058U) via oligonucleotide recombineering to endow high erythromycin resistance (ERY; MIC >1000 μg mL⁻¹). FIG. 18B shows a schematic representation of the ERY-dependent sfGFP reporter. In the absence of ERY, sfGFP is efficiently translated via orthogonal translation. Addition of ERY (100 μg mL⁻¹) promotes translation stalling at ermCL, abrogating sfGFP translation by ERY-sensitive LSUs. FIG. 18C shows that free and stapled ERY-sensitive LSUs showed a marked reduction in sfGFP production at high inhibitor concentrations, whereas the corresponding ERY-resistant (23S A2058U) LSUs showed no appreciable change in activity (n=3). FIG. 18D shows that ERY-sensitive LSUs re-established strain sensitivity to ERY due to free subunit exchange between episomally- and genomically-derived ribosomes (n=21). FIG. 18E shows an evaluation of intersubunit exchange using the ERY-dependent reporter system. Heterologous ribosomes with high 16S sequence identity to E. coli (≥99.2%) appeared to freely exchange with host subunits, while heterologous ribosomes with intermediate sequence identity (97.0-92.9%) preferentially associated with cognate subunits at a rate comparable to the stapled E. coli ribosome. More divergent heterologous ribosomes (90.3-79.3%) preferentially utilized E. coli large subunits (n=28 for E. coli; otherwise n=7). Data for each ribosome has been normalized to its corresponding sfGFP signal at 0 μg mL⁻¹ ERY. Data reflect the mean and standard deviation of the indicated biological replicates. Comprehensive data are also reported in FIG. 21 below.

[0108] FIGS. 19A and 19B show a comparison of SQ strain complementation and orthogonal translation. FIG. 19A shows that to evaluate heterologous rRNAs via SQ strain complementation, rRNA plasmids were transformed into the SQ171 strain. After transformation, colonies took up to 120 hours to form. Colonies were then grown in media+/−kanamycin, and were evaluated over 3 days for pSacB persistence, after which colonies were glycerol stocked. Finally, colonies were grown overnight and back-diluted to generate a growth curve. FIG. 19B shows that to evaluate heterologous rRNAs via orthogonal translation, rRNA plasmids were transformed alongside the reporter plasmid and colonies were incubated overnight. Colonies were then picked into media and grown overnight, after which sfGFP fluorescence was read. Detailed experimental conditions for both assays are described in Example 1 below.

[0109] FIGS. 20A to 20E show benchmarking of the ERY-dependent reporter system. FIG. 20A shows that the ERY-dependent reporter discriminated between three possible subunit assembly scenarios. When an orthogonal SSU assembled with a cognate LSU, the ribosome was unable to translate the orthogonal sfGFP reporter due to ERY-sensitivity. Alternatively, heterologous SSUs may assemble with E. coli LSUs, resulting in robust sfGFP translation. Finally, E. coli SSUs may assemble with heterologous LSUs, resulting in strain toxicity due to an inability to translate essential E. coli genes and low sfGFP signal as a result. FIG. 20B shows that heterologous ribosomes closely related to E. coli (>99.2% 16S sequence ID) re-sensitized S4246 cells to ERY treatment due to the usage of sensitive LSUs for translating host genes (n=7). FIG. 20C shows orthogonal translation activities observed for native ribosomes and ribosomes stapled to cognate LSUs vs. E. coli LSUs (n=8). FIG. 20D shows ERY-dependent reporter data obtained for native ribosomes and ribosomes stapled to cognate LSUs vs. E. coli LSUs at 100 μg mL⁻¹ ERY. Data for each ribosome was normalized to its sfGFP fluorescence at 0 μg mL⁻¹ ERY (n=28 for E. coli; otherwise n=7). FIG. 20E shows that OD600 values observed for heterologous ribosomes with high 16S sequence identity to E. coli (≥99.2%) at 100 μg mL⁻¹ ERY increased after subunit stapling, which indicated a decrease in intersubunit exchange (n=7). Data reflect means and standard deviations of the indicated biological replicates. Comprehensive data are reported in FIG. 21 below.

[0110] FIG. 21 shows a summary of stapled ribosome data. Data reflect means and standard deviations of n=7-28 biological replicates.

[0111] FIG. 22 shows a list of rRNA and r-protein expression plasmids used in certain embodiments of the instant disclosure. The rRNA/r-protein combinations that yielded the highest degree of activity have been highlighted in the figure and have also been deposited in Addgene.

### DETAILED DESCRIPTION OF THE INVENTION

[0112] The present disclosure is directed, at least in part, to discovery of an improved system for monitoring and improving heterologous ribosome activity within a host cell (optionally, within a highly tractable host cell, such as E. coli, B. subtilis, or other), where such assessment is not reliant upon the heterologous ribosome maintaining growth of the host cell. Specifically, the instant disclosure provides a reporter system that enables monitoring of heterologous ribosome activity in a host cell, via engineering of heterologous rRNA operon sequences and reporter operon sequences. Strikingly, for certain heterologous ribosomes, activity of a heterologous rRNA operon can be improved in a host cell by replacing intergenic sequences of the heterologous operon with corresponding host cell intergenic sequences, as well as via introduction of certain heterologous r-proteins (e.g., S20, S16, S1 and/or S15 r-proteins).

[0113] Various new heterologous rRNA-harboring genetic organisms have also been provided herein. Such organisms allow for improved screening approaches to identify ribosome-targeting agents, as well as for improved synthetic ribosome evolution. The instant disclosure therefore also provides methods and compositions for identifying ribosome-targeting antibiotic agents, including, e.g., identification of narrow-spectrum antibiotic agents that preferentially target ribosomes of pathogenic microbes, as compared to ribosomes of commensal microbes (in certain embodiments, ribosomal components of pathogenic microbes and commensal microbes can be multiplexed within a common host cell, allowing for direct comparison of, e.g., response to a test compound, between ribosomal components of pathogenic microbes and those of commensal microbes). Such narrow-spectrum antibiotic agents promise clear therapeutic advantages, e.g., where applied to microbes of the gut microbiome, as well as in other scenarios. The compositions, methods and application(s) of the instant disclosure are considered in additional detail below.

[0114] The ribosome represents a promising avenue for synthetic biology, but its complexity and essentiality have until now hindered significant engineering efforts. Heterologous ribosomes, comprising rRNAs from divergent organisms, are expected to offer opportunities for enhanced orthogonality or discovery of novel translational functions. Such ribosomes have previously been evaluated in E. coli via complementation of a genomic ribosome deficiency, but this prior art method has failed to guide engineering of refractory ribosomes. In certain aspects, the instant disclosure has implemented orthogonal ribosome binding site (RBS):anti-RBS pairs to quantify the translation of heterologous ribosomes, which has been observed herein to significantly improve the accuracy and throughput of heterologous ribosome analysis. Orthogonal translation has been applied herein to define general requirements for efficient heterologous rRNA processing, and the instant disclosure has discovered that supplementation with a small subset of cognate r-proteins enhanced heterologous ribosome activity for rRNAs derived from organisms with as little as 76.1% 16S rRNA sequence identity to E. coli. In addition, the instant disclosure has identified that moderately divergent heterologous rRNAs can selectively assemble into species-specific ribosomes with limited E. coli subunit association. Cumulatively, certain aspects of the instant disclosure provide a general framework for heterologous ribosome engineering in living cells.

[0115] Heterologous ribosomes are canonically produced in E. coli via introduction of ribosomal components derived from extant microbes. Until now, the efficiency of this process has not been high for increasingly divergent microbes, owing to poor ribosome maturation and interaction with host E. coli factors. The instant disclosure has identified defined methods for producing previously intractable heterologous ribosomes in E. coli via (1) processing signal engineering and (2) ribosomal protein complementation, thereby yielding high activity heterologous ribosomes that mimic the natural counterparts.

[0116] In particular, non-native ribosomes (i.e., ribosomes from foreign organisms) have been employed herein, and systems for improving heterologous ribosome function in E. coli have been engineered through the following: (1) engineering of specific intergenic sequences to enhance and enable robust ribosomal RNA maturation via interaction with appropriate cellular RNAses, and (2) supplementation with select cognate ribosomal proteins to complement assembly deficiencies of heterologous rRNAs.

[0117] In addition to catalyzing the biosynthesis of the complete cellular proteome, the ribosome serves as a hub for signaling events, integrating nutrient availability with growth dynamics and resource allocation (1, 2). In prokaryotes, this functionality is enabled by the concerted action of numerous components: the 16S rRNA and 21 ribosomal proteins (r-proteins) define the small subunit (SSU or 30S), whereas the 23S rRNA, 5S rRNA and 33 r-proteins define the large subunit (LSU or 50S) (3). Extensive efforts towards engineering translation have yielded researcher-dictated, specialized functions in vivo: parallel genetic circuits (4, 71-74), augmented polypeptide diversity using non-canonical amino acids (5), expanded genetic codes incorporating quadruplet codons (6), and linked ribosomal subunits for improved cellular orthogonality (7-9). However, these efforts typically made use of E. coli components, yielding systems that continue to crosstalk with the chassis bacterial cell in unpredictable ways.

[0118] Conversely, ribosomal components derived from divergent microorganisms offer enhanced orthogonality as well as the opportunity to discover unique or dedicated ribosomal capabilities, as indicated by naturally occurring subpopulations of prokaryotic ribosomes (10): stress-inducible production of rrsH ribosomes in E. coli modifies the cellular translational program (11), rrnl ribosomes in Vibrio vulnificius selectively translate certain mRNAs (70), and genetically heterogeneous ribosomes are produced at defined stages of the complex Streptomyces coelicolor developmental cycle (12). R-protein complements further specialize ribosomal function, as they are known to vary in the E. coli ribosome under different growth conditions (13), and ribosomes carrying S1 play a role in leaderless mRNA decoding (14). Heterologous ribosomes, synthesized in E. coli using diverse rRNAs and cognate r-proteins, therefore facilitate the discovery or engineering of novel translational capabilities.

[0119] Prior investigations of heterologous rRNAs have employed E. coli Δ7 strains lacking all seven chromosomal rRNA operons (e.g., SQ171, KT101, SQZ10, SQ2518) (15-17). These Δ7 strains additionally informed studies on rDNA copy number (18), ribosomal sequence-function relationships (19), factors affecting rRNA processing (20, 21), and rRNA-protein interactions (22). These strains bear a complete genomic rRNA deficiency and are complemented by a counter-selectable rRNA-encoding plasmid, facilitating plasmid exchange with rRNA variants capable of sustaining E. coli survival. Indeed, full-length heterologous rRNA operons derived from species bearing ≥93.2% 16S sequence identity to their E. coli counterparts were found to sustain E. coli Δ7 strain viability (17), whereas 16S sequence fragments bearing ≥80.9% identity were identified to substitute for otherwise wildtype E. coli 16S rRNAs (16). Natural horizontal gene transfer events in the evolutionary record have provided further evidence for heterologous translation with intragenomic 16S identity as low as 88.4% (23-27).

[0120] However, past E. coli Δ7 strain complementation assays have proven problematic for systematically evaluating heterologous ribosome function given the myriad roles played by the ribosome in sustaining cell viability, both catalytic and regulatory (28, 29). Specifically, past efforts to engineer heterologous ribosome function have been hampered by the absence of a more quantitative translational assay that reports on a single aspect of ribosome function (as is now disclosed herein). Therefore, guidelines have now been developed herein for evaluating and enhancing the translational activity of heterologous rRNAs in E. coli using a method that reports exclusively on catalytic activity, independent of an rRNA's ability to support cell growth. To achieve this, a library of 34 complete rRNA operons derived from phylogenetically diverse microbes was constructed. Activities of the of 34 complete rRNA operons have been evaluated herein via E. coli Δ7 strain complementation as well as orthogonal translation, which implemented engineered RBS:anti-RBS pairs that exclusively translated researcher-defined reporter transcripts (4, 71-74). Finding a high degree of correlation between the two methods, the orthogonal translation method has been applied herein to guide rRNA processing sequence engineering. The instant disclosure has therefore identified that divergent intergenic sequences exert significant consequences upon heterologous ribosome maturation in E. coli. Furthermore, a small subset of r-proteins were identified that significantly enhanced the activity of refractory heterologous ribosomes possessing as little as 76.1% 16S rRNA sequence identity to E. coli. In addition, it has been identified herein that heterologous 16S rRNAs having intermediate sequence identity preferentially associated with their cognate 23S rRNAs in E. coli. Together, these results have established the herein-disclosed quantitative and extensible method(s) for the engineering of heterologous ribosome activity in vivo, which greatly facilitates the development of diverse ribosomes for synthetic biology applications (including the development of diverse ribosomes with specialized functions). In addition to the process for improving heterologous rRNA maturation and activity, new organisms harboring heterologous rRNAs have also been manufactured and provided herein. Use of such new organisms to streamline identification of new antibiotics, including highly selective/narrow spectrum antibiotics capable of selectively killing targeted pathogenic microbes, is also contemplated.

[0121] Herein, microbial phylogenetic relationships have been integrated with orthogonal translation via engineered ribosome binding site (RBS):anti-RBS pairs to quantify heterologous ribosome activity. The findings disclosed herein highlight generally applicable requirements for efficient rRNA processing and cognate r-protein supplementation, which yield functional heterologous ribosomes in E. coli. (and are contemplated to yield functional heterologous ribosomes in other microbes (e.g., B. subtilis) Cumulatively, the instant disclosure also enables further generation of functional heterologous ribosomes possessing new and specialized capabilities for synthetic translation.

rRNAs and r-Proteins

[0122] The E. coli ribosome is composed of two large particles, the 30S and the 50S subunits. The 30S subunit consists of a 16S rRNA molecule and 21 small ribosomal proteins (“r-proteins’). The 50S subunit is composed of two ribosomal RNA (rRNA) molecules, 23S and 5S rRNA, and 31 large ribosomal proteins.

[0123] Prokaryotic ribosomes are similar across species, but homology of individual ribosomal proteins diverges with phylogenetic distance. rRNAs are relatively few in number and yet play an important role in protein synthesis (Gutell et al., 1985, Prog. Nucleic Acid Res. Mol. Biol. 32:155-216). Ribosome assembly in bacteria is a tightly controlled process. For example, the synthesis of ribosomal components, rRNA and r-proteins, is coordinately regulated to ensure that these molecules are produced in the optimal stoichiometry. Protein-RNA interactions play important regulatory roles at several steps in this process. Synthesis of r-proteins is negatively regulated at the translational level by the binding of repressor r-proteins to specific sites in mRNA. As part of another regulatory step in the ribosome assembly process, certain r-proteins bind to rRNA, to initiate the ordered assembly of the ribosome. Binding of these r-proteins, termed “primary binders,” is required for the subsequent steps of ribosome assembly (Zengel & Lindahl, 1994, Prog. Nuc. Acid Res. Molec. Biol. 47:332-370).

[0124] The interaction of ribosomal proteins with RNA influences the synthesis of ribosomal proteins and their assembly into fully functional ribosomes. Ribosomal assembly in E. coli involves the coordinate expression of rRNA and r-proteins. Binding of certain ribosomal proteins to ribosomal RNAs (rRNAs) is necessary for the ordered assembly of fully functional ribosomes. In the course of assembly, a subset of ribosomal proteins, termed primary binding r-proteins, has been identified as binding rRNA directly, and as facilitating the binding of other ribosomal proteins.

rRNA, r-Protein and Construct Sequences

[0125] rRNA, r-protein and other rRNA and/or reporter construct sequences of the instant disclosure are presented in the accompanying Sequence Listing, with FIG. 17 also presenting a description of each sequence.

rRNA-Deleted Host Strains

[0126] It is expressly contemplated that certain compositions and methods of the instant disclosure can employ any appropriate rRNA-deleted host cell. Exemplary rRNA-deleted host cells include, without limitation:

[0127] SQ171 is an rrn E. coli strain lacking all seven chromosomal rRNA operons and carrying a single, counter-selectable plasmid bearing the wildtype rrnC operon (50).

[0128] KT101 is another example of a rrn E. coli strain lacking all seven chromosomal rRNA operons (rrnA, B, C, D, E, G, H) (21). Growth of KT01 can be complemented by the rrnB operon encoded in rescue plasmid pRB101 (Kitahara et al. PNAS 109: 19220-19225).

### Bacterial Culture and Transformation

[0129] Culture and transformation of bacterial cells can be performed by any art-recognized method. E. coli is commonly propagated in rich media, with examples including LB, 2× yeast extract-tryptone (YT), Terrific Broth (TB), and Super Broth (SB).

[0130] While early attempts to achieve transformation of E. coli were unsuccessful and it was at one time even believed that E. coli was refractory to transformation, Mandel and Higa (J. Mol. Bio. 53: 159-162 (1970)) found that treatment with CaCl₂) allowed E. coli bacteria to take up DNA from bacteriophage k. In 1972, Cohen et al. showed CaCl₂)-treated E. coli bacteria were effective recipients for plasmid DNA (Cohen et al., Proc. Natl. Acad. Sci., 69: 2110-2114 (1972)). Since transformation of E. coli is an essential step or cornerstone in many cloning experiments, it is desirable that it be as efficient as possible (Lui and Rashidbaigi, BioTechniques 8: 21-25 (1990)). Hanahan (J. Mol. Biol. 166: 557-580 (1983), herein incorporated by reference) examined factors that affect the efficiency of transformation, and devised a set of conditions for optimal efficiency (expressed as transformants per μg of DNA added) applicable to most E. coli K12 strains. Typically, efficiencies of 10⁷ to 10⁹ transformants/μg can be achieved depending on the strain of E. coli and the method used (Liu & Rashidbaigi, BioTechniques 8: 21-25 (1990), herein incorporated by reference).

[0131] Many methods for bacterial transformation are based on the observations of Mandel and Higa (J. Mol. Bio. 53: 159-162 (1970)). Apparently, Mandel and Higa's treatment induces a transient state of “competence” in the recipient bacteria, during which they are able to take up DNAs derived from a variety of sources. Many variations of this basic technique have since been described, often directed toward optimizing the efficiency of transformation of different bacterial strains by plasmids. Bacteria treated according to the original protocol of Mandel and Higa yield 10⁵-10⁶ transformed colonies/μg of supercoiled plasmid DNA. This efficiency can be enhanced 100- to 1000-fold by using improved strains of E. coli (Kushner, In: Genetic Engineering: Proceedings of the International Symposium on Genetic Engineering, Elsevier, Amsterdam, pp. 17-23 (1978); Norgard et al., Gene 3:279-292 (1978); Hanahan, J. Mol. Biol. 166: 557-580 (1983)) combinations of divalent cations ((Kushner, In: Genetic Engineering: Proceedings of the International Symposium on Genetic Engineering, Elsevier, Amsterdam, pp. 17-23 (1978)) for longer periods of time (Dagert and Ehrlich, Gene 6: 23-28 (1979)) and treating the bacteria with DMSO (Kushner, In: Genetic Engineering: Proceedings of the International Symposium on Genetic Engineering, Elsevier, Amsterdam, pp. 17-23 (1978)), reducing agents, and hexamminecobalt chloride (Hanahan (J. Mol. Biol. 166: 557-580 (1983).

[0132] A number of procedures exist for the preparation of competent bacteria and the introduction of DNA into those bacteria. A very simple, moderately efficient transformation procedure for use with E. coli involves re-suspending log-phase bacteria in ice-cold 50 mM calcium chloride at about 10¹⁰ bacteria/ml and keeping them ice-cold for about 30 min. Plasmid DNA (0.1 mg) is then added to a small aliquot (0.2 ml) of these now competent bacteria, and the incubation on ice continued for a further 30 min, followed by a heat shock of 2 min at 42° C. The bacteria are then usually transferred to nutrient medium and incubated for some time (30 min to 1 hour) to allow phenotypic properties conferred by the plasmid to be expressed, e.g. antibiotic resistance commonly used as a selectable marker for plasmid-containing cells. Protocols for the production of high efficiency competent bacteria have also been described and many of those protocols are based on the protocols described by Hanahan (J. Mol. Biol. 166:557-580 (1983).

[0133] Another rapid and simple method for introducing genetic material into bacteria is electoporation (Potter, Anal. Biochem. 174: 361-73 (1988)). This technique is based upon the original observation by Zimmerman et al., J. Membr. Biol. 67: 165-82 (1983), that high-voltage electric pulses can induce cell plasma membranes to fuse. Subsequently, it was found that when subjected to electric shock (typically a brief exposure to a voltage gradient of 4000-16000 V/cm), the bacteria take up exogenous DNA from the suspending solution, apparently through holes momentarily created in the plasma membrane. A proportion of these bacteria become stably transformed and can be selected if a suitable marker gene is carried on the transforming DNA transformed (Newman et al., Mol. Gen. Genetics 197: 195-204 (1982)). With E. coli, electroporation has been found to give plasmid transformation efficiencies of 10⁹-10¹⁰/μg DNA (Dower et al., Nucleic Acids Res. 16: 6127-6145 (1988)).

[0134] Bacterial cells are also susceptible to transformation by liposomes (Old and Primrose, In Principles of Gene Manipulation: An Introduction to Gene Manipulation, Blackwell Science (1995)). A simple transformation system has been developed which makes use of liposomes prepared from cationic lipid (Old and Primrose, (1995)). Small unilamellar (single bilayer) vesicles are produced. DNA in solution spontaneously and efficiently complexes with these liposomes (in contrast to previously employed liposome encapsidation procedures involving non-ionic lipids). The positively-charged liposomes not only complex with DNA, but also bind to bacteria and are efficient in transforming them, probably by fusion with the cells. The use of liposomes as a transformation or transfection system is called lipofection.

[0135] B. subtilis (as well as other microbes) can be grown in culture via art-recognized methods. Transformation of B. subtilis can be achieved via methods including electroporation, protoplast transformation (B. subtilis protoplasts can be transformed but are fragile, with only about 1-10% of protoplasts surviving transformation and becoming regenerated) and use of natural competence, among other methods (see, e.g., Zhang and Zhang. Microb. Biotechnol. 4: 98-105).

### Pathogenic Microbes

[0136] Contemplated pathogenic microbes of the instant disclosure include, without limitation, bacteria from the following genera: Bordetella, Borrelia, Brucilla, Campylobacter, Chlamydia, Chlamydophila, Clostridium, Corynebacterium, Enterococcus, Escherichia, Francisella, Haemophilus, Helicobacter, Legionella, Leptospira, Listeria, Mycobacterium, Mycoplasma, Neisseria, Pseudomonas, Rickettsia, Salmonella, Shigella, Staphylococcus, Streptococcus, Treponema, Vibrio and Yersinia.

[0137] In certain embodiments, the pathogenic microbe is a bacteria or bacterial combination selected from among the following: Mycobacterium tuberculosis, Bifidobacterium longum, Veillonella parvula, Clostridium difficile, Bacillus subtilis, Escherichia coli, Staphylococcus aureus, Enterococcus faecium, Enterococcus faecalis, Bacteroides thetaiotaomicron, Helicobacter pylori, Desulfovibrio bastinii, Desulfovibrio vulgaris, Rickettsia parkeri, Rhodopseudomonas palustris, Caulobacter crescentus, Mariprofundus ferrooxydans, Ghiorsea bivora, Neisseria gonorrhoeae, Burkholderia cenocepacia, Bordetella pertussis, Alcaligenes faecalis, Acinetobacter baumannii, Pseudomonas aeruginosa, Marinospirillum minutulum, Alteromonas macleodii, Vibrio cholerae, Providencia stuartii, Proteus mirabilis, Serratia marcescens, Edwardsiella tarda, Enterobacter cloacae, Klebsiella oxytoca, Klebsiella pneumoniae, Klebsiella aerogenes, Citrobacter freundii, Salmonella enterica, Yersinia pestis, Yersinia pseudotuberculosis, Yersinia enterocolitica, Mycobacterium bovis, Mycobacterium avium, Neisseria meningitidis, Listeria monocytogenes, Streptococcus pyogenes, Campylobacter jejuni, Bacteroides fragilis, Proteus vulgaris, Haemophilus influenza and Shigella spp. (e.g., Shigella flexneri, Shigella dysenteriae, Shigella sonnei, Shigella boydii).

### Commensal Microbes

[0138] Contemplated commensal microbes of the instant disclosure include, without limitation, microbes of the phyla Firmicutes, Bacteroidetes, Bifidobacteria, Eubacteria, Ruminococcus, Lactobacillus, Peptococcus, Proteobacteria, Verrumicrobia, Actinobacteria, Fusobacteria and/or Cyanobacteria, as well as combinations thereof.

### Test Compound Libraries/Compound Screening

[0139] Certain embodiments of the instant disclosure expressly contemplate identification of heterologous ribosome-targeting agents, including in certain embodiments agents that are selective for ribosomes of pathogens, optionally as compared to ribosomes of commensal microorganisms. Exemplary forms of such agents include small molecules and macromolecules (e.g., peptides, antibodies, nucleic acids and other biologics). For example, screening of a small molecule drug-repurposing library can be performed to identify agents that selectively inhibit ribosomes derived from pathogenic organisms. Specific examples of expressly contemplated compound libraries include the Pharmakon library (www.msdiscovery.com/pharmakon.html), other Microsource libraries (US Drug collection, NatProd collection or Spectrum collection), Chembridge screening libraries (EXPRESS-Pick Collection Stock or CORE Library Stock; www.chembridge.com/screening_libraries/), HTS, Advanced, and Premium screening libraries from Enamine (enamine.net/hit-finding/compound-collections/screening-collection), among other available libraries.

### Kits

[0140] The instant disclosure also provides kits containing agents of this disclosure for use in the methods of the present disclosure. Kits of the instant disclosure may include one or more containers comprising a nucleic acid construct, organism, or other component of the system(s) described herein.

[0141] The instructions generally include information as to use of the components included in the kit. Instructions supplied in the kits of the instant disclosure are typically written instructions on a label or package insert (e.g., a paper sheet included in the kit), but machine-readable instructions (e.g., instructions carried on a magnetic or optical storage disk) are also acceptable.

[0142] The kits of this disclosure are in suitable packaging. Suitable packaging includes, but is not limited to, vials, bottles, jars, flexible packaging (e.g., sealed Mylar or plastic bags), and the like.

[0143] Kits may optionally provide additional components such as buffers and interpretive information. Normally, the kit comprises a container and a label or package insert(s) on or associated with the container.

[0144] The practice of the present disclosure employs, unless otherwise indicated, conventional techniques of chemistry, molecular biology, microbiology, recombinant DNA, genetics, immunology, cell biology, cell culture and transgenic biology, which are within the skill of the art. See, e.g., Maniatis et al., 1982, Molecular Cloning (Cold Spring Harbor Laboratory Press, Cold Spring Harbor, N.Y.); Sambrook et al., 1989, Molecular Cloning, 2nd Ed. (Cold Spring Harbor Laboratory Press, Cold Spring Harbor, N.Y.); Sambrook and Russell, 2001, Molecular Cloning, 3rd Ed. (Cold Spring Harbor Laboratory Press, Cold Spring Harbor, N.Y.); Ausubel et al., 1992), Current Protocols in Molecular Biology (John Wiley & Sons, including periodic updates); Glover, 1985, DNA Cloning (IRL Press, Oxford); Anand, 1992; Guthrie and Fink, 1991; Harlow and Lane, 1988, Antibodies, (Cold Spring Harbor Laboratory Press, Cold Spring Harbor, N.Y.); Jakoby and Pastan, 1979; Nucleic Acid Hybridization (B. D. Hames & S. J. Higgins eds. 1984); Transcription And Translation (B. D. Hames & S. J. Higgins eds. 1984); Culture Of Animal Cells (R. I. Freshney, Alan R. Liss, Inc., 1987); Immobilized Cells And Enzymes (IRL Press, 1986); B. Perbal, A Practical Guide To Molecular Cloning (1984); the treatise, Methods In Enzymology (Academic Press, Inc., N.Y.); Gene Transfer Vectors For Mammalian Cells (J. H. Miller and M. P. Calos eds., 1987, Cold Spring Harbor Laboratory); Methods In Enzymology, Vols. 154 and 155 (Wu et al. eds.), Immunochemical Methods In Cell And Molecular Biology (Mayer and Walker, eds., Academic Press, London, 1987); Handbook Of Experimental Immunology, Volumes I-IV (D. M. Weir and C. C. Blackwell, eds., 1986); Riott, Essential Immunology, 6th Edition, Blackwell Scientific Publications, Oxford, 1988; Hogan et al., Manipulating the Mouse Embryo, (Cold Spring Harbor Laboratory Press, Cold Spring Harbor, N.Y., 1986); Westerfield, M., The zebrafish book. A guide for the laboratory use of zebrafish (Danio rerio), (4th Ed., Univ. of Oregon Press, Eugene, 2000).

[0145] Unless otherwise defined, all technical and scientific terms used herein have the same meaning as commonly understood by one of ordinary skill in the art to which this disclosure belongs. Although methods and materials similar or equivalent to those described herein can be used in the practice or testing of the present disclosure, suitable methods and materials are described below. All publications, patent applications, patents, and other references mentioned herein are incorporated by reference in their entirety. In case of conflict, the present specification, including definitions, will control. In addition, the materials, methods, and examples are illustrative only and not intended to be limiting.

[0146] Reference will now be made in detail to exemplary embodiments of the disclosure. While the disclosure will be described in conjunction with the exemplary embodiments, it will be understood that it is not intended to limit the disclosure to those embodiments. To the contrary, it is intended to cover alternatives, modifications, and equivalents as may be included within the spirit and scope of the disclosure as defined by the appended claims. Standard techniques well known in the art or the techniques specifically described below were utilized.

### EXAMPLES

### Example 1: Materials and Methods

[0147] Unless otherwise noted, all PCRs were performed using Phusion U HotStart DNA Polymerase (Life Technologies). Water was purified using a MilliQ water purification system (MilliporeSigma). Antibiotics (Gold Biotechnology) were used at the following concentrations for plasmid selection: 30 μg mL⁻¹ Kanamycin, 40 μg mL⁻¹ chloramphenicol, 50 μg mL⁻¹ carbenicillin, 100 μg mL⁻¹ spectinomycin. Antibiotics concentrations were one-third the aforementioned for strains bearing three unique plasmids. Unless otherwise noted, all DNA manipulations were performed in NEB Turbo cells (New England Biolabs) or Mach1F cells (Mach1 T1_{R} cells (Thermo Fisher Scientific) mated with F′ episome of the previously described S2060 strain (47)). All fluorescence and luminescence assays were carried out using E. coli S2060 (47).

### Chemically Competent Cell Preparation

[0148] Chemically competent cells were prepared for cloning and assay strains. A glycerol stock of the appropriate strain was used to start a 2 mL culture of the strain supplemented with the appropriate antibiotics and grown up overnight at 30° C. at 300 RPM. The saturated culture was diluted 1:1000 in 50 mL 2×YT (United States Biological) with appropriate antibiotics and grown to OD=0.3-0.5 in a 370 shaker at 300 RPM. Cells were pelleted in a pre-chilled conical tube (VWR) by centrifugation at 8,000 g for 10 min at 4° C. The supernatant was removed and the cells were resuspended in approximately 20 mL 10% glycerol, then pelleted by centrifugation at 8,000 g for 10 min at 4° C. The supernatant was removed and the cells were resuspended in chilled TSS buffer (2×YT media supplemented with 5% DMSO, 10% PEG2250, 2 mM MgCl2) Cells were flash frozen in liquid N₂ at 100 μL aliquots and transferred to −80° C. storage.

### USER Cloning

[0149] Plasmids were constructed using USER cloning, or a combination of USER cloning and overlap extension PCR. In USER cloning, primers are designed to include a deoxyuracil base approximately 10-20 from the 5′ end of the primer; the region between the deoxyuracil base and the 5′ end of the primer is known as the “USER junction” and specifies the homology necessary for plasmid assembly. USER junctions were designed to have a 42° C.<Tm<70° C., minimal secondary structure, and begin with a dA and end with a dT (the latter is replaced with a dU by uracil DNA glycosylase during assembly). PCR products were all gel purified using QIAquick Gel Extraction kit (Qiagen) and eluted to a final volume of 10 μL. Fragments were quantified using a NanoDrop 1000 Spectrophotometer (Thermo Fisher Scientific). For assembly, PCR products with complementary USER junctions were added in an equimolar ratio (0.1-1 pmol each) in a 10 μl reaction containing 0.75 units DpnI (New England Biolabs), 0.75 units USER (Uracil-Specific Excision Reagent; Endonuclease VIII and Uracil-DNA Glycosylase) enzyme (New England Biolabs), 1 unit of CutSmart Buffer (50 mM potassium acetate, 20 mM Tris-acetate, 10 mM magnesium acetate, 100 μg mL⁻¹ BSA at pH 7.9; New England Biolabs). Reactions were incubated at 370 for 20 min, then heated at 80° C. and slowly cooled to 22° C. at 0.1° C./s in a thermocycler.

[0150] Inserts of plasmids “A01”, “AO2”, and “S1-S21,” consisting of many small fragments, were cloned using overlap extension PCR. Primers were designed containing ˜15 bp overhangs complementary to the adjoining fragment. Individual fragments were amplified and gel purified as above; then 0.2 picomoles of each fragment was used in a 200 μL PCR reaction to join each fragment together. This fragment was gel purified and USER assembly was used to clone it into the plasmid backbone. Plasmid constructs were heat-shocked into chemically competent NEB Turbo or Mach1f cells: 100 μL 2×KCM (100 mM KCl, 30 mM CaCl₂), 50 mM MgCl2 in MilliQ H2O) was added to 100 μl cells alongside plasmid DNA. Cells were incubated on ice for 15 min, heat shocked at 42° C. for 2 min, and placed back on ice for 2 min. Cells were recovered in 1 mL 2×YT media at 37° with shaking at 300 RPM for a minimum of 45 min. Cells were streaked on 2×YT media+1.8% agar plates supplemented with the appropriate antibiotic.

### Amplification of Ribosomal Operons and R-Proteins

[0151] Ribosomal DNA, contiguous r-protein operons and single r-protein ORFs were amplified from bacterial strains or the corresponding gDNA. Direct amplification from bacterial strains required boiling at 95° C. for 10 min in MilliQ water prior to PCR for efficient amplification. In cases where a non-type strain was used, universal primers

(5′-ACCGGCCGCUgtgccagcagccgcggtaatac-3′,
SEQ ID NO: 401)
and
(5′-AGGGGTTCCGCGCACAUgtgacgggcggtgtgtacaag-3′,
SEQ ID NO: 402)
(USER junctions bold, annealing region is
underlined)

were used to amplify a ˜900 bp fragment from the bacterial genome to include a partial 16S element for subcloning and sequencing, allowing for closest sequenced genome determination. For species with high sequence variability between ribosomal operons, a representative operon was chosen based on maximal sequence homology to E. coli.

### Bacterial Strain Genomic Modifications

[0152] The erythromycin-resistant strain S4246 was generated using conventional recombineering (76, 77). Briefly, chemically competent S2060 cells were transformed with pKD46 (77) and plated on 2×YT agar plates supplemented with 50 μg mL⁻¹ carbencillin at 30° C. A single colony was picked, grown at 30° C. in 2×YT liquid medium supplemented with 50 μg mL⁻¹ carbencillin and 10 mM arabinose, and made chemically competent when the culture reached the appropriate OD600. Chemically competent S2060/pKD46 cells were transformed with the phosphothiorated recombineering oligonucleotide AB5708 (5′-C*T*C*A*ATGTTCAGTGTCAAGCTATAGTAAAGGTTCACGGGGTCTTACCGTCTTG CCGCG GGTACACTGCATCTTCACAGCGAGTTCAATTT-3′, SEQ ID NO: 403; phosphothirate bonds indicated as *, introduced mutation is bolded) to introduce the rrlA-H A2058U mutation on replichore 2 (76). Following recovery for 3 hours at 30° C., transformed cells were plated on 2×YT agar plates supplemented with 1000 μg mL⁻¹ erythromycin and incubated at 37° C. to cure the resident pKD46 plasmid. Following overnight growth, single colonies were picked into 2×YT liquid medium supplemented with 50 μg mL⁻¹ streptomycin, 10 μg mL⁻¹ tetracycline and 1000 μg mL⁻¹ erythromycin and allowed to grow overnight at 37° C. To assess the degree of rrlA-H mutagenesis, cultures were used as PCR templates using primers AB5710 (5′-GAAATTCCTTGTCGGGTAAGTTCC-3′, SEQ ID NO: 404) and AB5711 (5′-GAACATCAAACATTAAAGGGTGGTATTTC-3′, SEQ ID NO: 405), and the PCR products were treated with the endonuclease HpyCH4III (New England Biolabs) according to the manufacturer's guidelines. Wildtype rrlA-H genotypes show no digestion under these conditions, whereas complete conversion results in complete PCR product digestion. Intermediate (incomplete) digestion indicated in incomplete conversion of all seven genomic alleles. The completely converted strain S4246 was confirmed to be sensitive to the following antibiotics (ensures no resistance crosstalk with plasmid-borne markers): carbenicillin (50 μg mL⁻¹), spectinomycin (100 μg mL⁻¹), chloramphenicol (40 μg mL⁻¹), and kanamycin (30 μg mL⁻¹). The strain was confirmed to be resistant to the following antibiotics: streptomycin (50 μg mL⁻¹), tetracycline (10 μg mL⁻¹), and erythromcyin (1000 μg mL⁻¹).

### Fluorescence Assays

[0153] For orthogonal translation assays, S2060 chemically competent cells were transformed with the E. coli o-rRNA plasmid and the relevant orthogonal reporter plasmid. Transformants were streaked on 2×YT media+1.8% agar supplemented with kanamycin and carbenicillin. Plates were grown in a 37° C. incubator for 16 hours. Colonies were picked into DRM (United States Biological) (48) supplemented with kanamycin, carbenicillin, 1 mM IPTG+/−1000 ng/mL aTc. To assay heterologous o-rRNA function, chemically competent cells carrying the sfGFP reporter plasmid were prepared (52060.sfGFP) and transformed with the appropriate o-rRNA plasmid. E. coli o-rRNA was always transformed alongside experimental o-rRNAs as a positive control. Transformants were streaked out and picked into media as above.

[0154] To assay r-protein effects on heterologous o-rRNA function, 52060.sfGFP chemically competent cells were co-transformed with the appropriate o-rRNA plasmid and r-protein plasmid. As a positive control, E. coli o-rRNA was transformed alongside an mCherry expression plasmid. In the absence of r-protein supplementation, heterologous o-rRNAs were transformed with mCherry to maintain consistent growth rates and antibiotic selection markers. Transformants were streaked on 2×YT media+1.8% agar supplemented with kanamycin, carbenicillin, chloramphenicol, and 200 mM glucose and picked into DRM supplemented with kanamycin, carbenicillin, chloramphenicol, 1 mM IPTG, 1000 ng/mL aTc, +/−10 mM arabinose.

[0155] To quantify fluorescence output, 150 μl each culture was aliquoted into a 96-well black wall, clear bottom plate (Costar). OD₆₀₀ and the appropriate excitation and emission wavelengths were used for fluorescence measurements (FIG. 15) using either a SpectraMax M3 (Molecular Devices) or Spark (Tecan) plate reader. Fluorescence was normalized to OD600 after blank media subtraction. Data were normalized to E. coli o-rRNA sfGFP/OD600 and expressed as a percentage; when assaying the effects of r-protein complementation, data were normalized to E. coli o-rRNA sfGFP/OD₆₀₀ bearing the mCherry control plasmid.

### SQ171 Cell Viability Assay

[0156] Chemically competent SQ171 (49, 50) cells were transformed with heterologous rRNAs as described above and recovered for up to 7 h in 2×YT in a 37° C. shaker. The recovery culture was centrifuged at 10,000 RCF for 2 min, then the pellet was resuspended in 100 μL MilliQ water. The resuspended cells were diluted serially in seven, 10-fold increments to yield eight total samples (undiluted, 10¹, 10², 10¹, 10⁴, 10⁵, 10⁶, and 10⁷ fold diluted). To determine the efficiencies of EP transformation and counter-selectable plasmid curing, 3 μl of diluted cells were plated on 1.8% agar-2×YT plates (United States Biological) supplemented with spectinomycin (100 μg mL⁻¹) and carbenicillin (50 μg mL⁻¹), with or without 5% sucrose (Millipore Sigma). For picking single colonies, the remaining undiluted cells were plated on 1.8% agar-2×YT plates (United States Biological) containing spectinomycin (100 μg mL⁻¹), carbenicillin (50 μg mL⁻¹) and 5% sucrose. All plates were grown for 16-120 hours in a 37° C. incubator.

[0157] Colonies transformed with the appropriate EP and surviving sucrose selection were picked and grown in DRM containing spectinomycin (100 μg mL⁻¹), carbenicillin (50 μg mL⁻¹), and 5% sucrose. Following growth of the EP-carrying strains for up to 3 days, cultures were glycerol stocked. Overnight cultures were started from these glycerol stocks in DRM containing spectinomycin (100 μg mL⁻¹), carbenicillin (50 μg mL⁻¹), and 5% sucrose. Following overnight growth, cultures were diluted 100-fold into fresh DRM containing spectinomycin (100 μg mL⁻¹) and carbenicillin (50 μg mL⁻¹). From the diluted cultures, 200 μl of each culture was transferred to a 96-well black wall, clear bottom plate (Costar), topped with 20 μL of mineral oil, and the OD600 was measured every 5 min over 15 h. Separately, 400 μL of each diluted culture was supplemented with kanamycin (30 μg mL⁻¹) and grown in a 37° C. shaker at 900 RPM. Colonies that survived selection in kanamycin were excluded from final analysis, as survival in kanamycin indicates persistence of the resident pCSacB plasmid (which carries a KanR resistance cassette) The doubling time of each culture was calculated using the Growthcurver package (51) in Rstudio.

### Phylogenetic Analyses

[0158] To calculate sequence identities, 16S sequences of all rRNAs used in the study were aligned using Clustal Omega with default settings (43). The phylogenetic tree (FIG. 2D) was constructed using phylogenetic relationships derived from the Genome Taxonomy database (GDTB) (52). In short, the entire bacterial GTDB phylogenetic tree (release 86.1) was downloaded from www.data.ace.uq.edu.au/public/gtdb/data/releases/release86/86.1/. The phylogenetic tree was pruned to include only species of interest (see FIG. 16 for the correspondence between species names and respective GTDB representative genomes) using the Ape package (version 5.3) in R (version 3.5.2). The pairwise distances between the tips in the pruned trees were computed using the Ape package 53. The tree was visualized using iTOL (54).

### Protein Sequence Similarity Analysis

[0159] To analyze sequence similarities of r-proteins, refseq proteomes of relevant species were downloaded and a local BLAST database was created from these proteomes. E. coli SSU r-protein sequences were queried against the database using local blastp with default parameters using the BLOSUM62 similarity matrix. Hits were filtered to those annotated with “30S,” “SSU,” or “ribosomal protein.”

### Data Availability

[0160] The data that support the findings of this study are available within the paper and its supplementary information files. Plasmid names are provided for reference in FIGS. 21 and 22 below. All plasmids generated in this study are in the process of being deposited in Addgene.

### Example 2: Heterologous rRNA Operons Complemented SQ171 Deficiency

[0161] SQ171 is an E. coli strain lacking all seven chromosomal rRNA operons and carrying a single, counter-selectable plasmid bearing the wildtype rrnC operon (17, 30). To investigate the ability of heterologous rRNAs to support SQ171 cell survival, episomally-encoded rRNA operons were introduced into the strain followed by sucrose counterselection of the resident E. coli rrnC plasmid using the B. subtilis sacB cassette (FIG. 1A). Heterologous rRNA operons capable of yielding functional heterologous ribosomes sustained SQ171 growth following sucrose counterselection. Prior work in SQ171 complementation using fully native heterologous rRNA operons was extended to Salmonella typhimurium (96.8% 16S rRNA sequence identity to E. coli) and Proteus vulgaris rRNA (93.2%) (17).

[0162] This strategy was validated using a number of increasingly divergent heterologous rRNA operons: Salmonella enterica (97.0% 16S rRNA sequence identity to E. coli), Alteromonas macleodii (85.9%), Pseudomonas aeruginosa (85.2%), and Acinetobacter baumannii (84.3%). Heterologous rRNA derived from S. enterica robustly supported SQ171 strain growth, while rRNA derived from A. macleodii and P. aeruginosa supported growth with a moderate defect (FIG. 1B). Surprisingly, a significant growth defect in SQ171 cells complemented by rRNA derived from A. baumannii was observed despite the minor difference in sequence identity to E. coli rRNA, as compared, e.g., to P. aeruginosa. Motivated by these results, the instant strategy was extended to a total of 21 increasingly divergent rRNA operons from diverse proteobacterial species. Each of these, including an rRNA derived from the zetaproteobacteria Mariprofundus ferrooxydans (80.7%), sustained SQ171 growth (FIG. 14). Consistent with the results obtained using completely native rRNA operons, fused heterologous-E. coli 16S fragments from gammaproteobacterial and betaproteobacterial rRNAs also supported Δ7 strain survival (16). A linear relationship was observed between complemented SQ171 strain fitness and 16S rRNA sequence identity, consistent with prior reports that strains relying on increasingly divergent rRNAs show comparatively reduced fitness (FIG. 1C) (16, 17).

### Example 3: Orthogonal Translation Enabled Quantitative Heterologous Ribosome Assessment

[0163] SQ171 complementation provides information about the capacity of a heterologous rRNA to translate the E. coli proteome of >4000 proteins (31), as well as the fulfillment of extracatalytic roles, including integrating environmental cues to modulate translation (29) and initiating the stringent response to cellular stressors (28). Furthermore, hibernation factors that regulate translation in gammaproteobacteria (e.g., E. coli) under unfavorable conditions are often not found in other proteobacterial classes (28), which indicates that phylogenetically distant rRNAs are unable to support SQ171 survival due to regulatory constraints rather than enzymatic ones, further confounding interpretation of strain survival. Finally, it was observed herein that SQ171 complementation pipelines required up to 5 days to observe colonies for strains relying on highly divergent rRNAs, where transformed colonies were laboriously counter-screened due to the high escape frequency of SacB-dependent negative selection (FIG. 19) (32, 33).

[0164] To overcome these technical limitations, an assay was developed herein that delivered a single, quantifiable, translational output orthogonal to native ribosomal machinery and therefore also independent of cell viability. Previously described orthogonal ribosome-mRNA pairs were leveraged, in which the antiRBS of the 16S rRNA was engineered to exclusively translate a researcher-defined transcript bearing a complementary RBS (4, 8, 71-74). This yielded an orthogonal pool of ribosomes (o-ribosomes) in vivo, the functions of which were monitored and quantified via reporter expression (superfolder GFP; sfGFP (34)) independently of cellular survival (FIG. 2A). Importantly, wild-type ribosomes were unable to translate the orthogonal mRNA (o-mRNA) reporter, which ensured that the observed reporter activity was dependent upon engineered o-ribosomes (FIG. 2B). This orthogonal translation genetic circuit did not significantly affect cellular viability, in agreement with prior reports (FIG. 6A) (4, 71-74), and both o-mRNA and o-ribosome production were controlled via small molecule inducers to further limit the cellular burden of their production (FIGS. 2A and 2C). Orthogonal translation was extended to numerous reporter proteins, and subsequently reporter-specific limitations on fluorescent protein functionality were observed (FIGS. 6B to 6H). Accordingly, a ten amino acid sfGFP leader was identified that obviated these constraints and improved orthogonal translation for various reporters (FIGS. 7A to 7P).

[0165] With a robust reporter system now in hand, the o-antiRBS was engineered into all 21 heterologous rRNAs capable of complementing SQ171 viability, alongside an additional 13 phylogenetically more divergent rRNAs (FIG. 14). The activity of all 34 o-rRNAs were quantified via orthogonal translation. It was thereby discovered that most rRNAs capable of supporting SQ171 growth similarly synthesized sfGFP at robust levels (FIG. 2D), with the exception of o-rRNAs derived from Serratia marcescens (96.0% 16S rRNA sequence identity to E. coli), Vibrio cholerae (90.3%), P. aeruginosa (85.2%), A. baumannii (84.3%), Alcaligenes faecalis (82.3%), Bordetella pertussis (81.6%), Burkholderia cenocepacia (81.5%), and M. ferrooxydans (80.7%). Notably, sfGFP translation fell markedly with phylogenetic distance from E. coli, wherein heterologous rRNAs exclusively derived from gammaproteobacteria and betaproteobacteria were capable of translating sfGFP (FIG. 2D). Supporting this observation, a robust correlation between 16S rRNA sequence identity to E. coli and orthogonal translation activity was observed (FIG. 2E). A robust correlation between complemented SQ171 fitness and orthogonal translation activity for each functional heterologous rRNA (FIG. 2F) was also observed. Collectively, these findings supported the use of orthogonal translation (as disclosed herein) in lieu of SQ171 complementation to quantify the translational activity of heterologous ribosomes.

### Example 4: Engineered rRNA Processing Improved Heterologous Ribosome Activity

[0166] The observed relationship between heterologous orthogonal translation activity and phylogenetic distance from E. coli indicated that certain elements encoded within the rRNA operon might have sufficiently diverged to restrict efficient ribosome assembly in E. coli. Analysis of per-base conservation (35) across the complete rRNA operons showed significantly higher conservation scores within the ribosomal genes (16S, 23S, and 5S rRNAs), as compared to intergenic elements (FIG. 3A). Intergenic sequences flanking each rRNA gene have been described as crucial to ribosome biogenesis, as they direct pre-rRNA transcript folding and processing by RNAses (3, 36, 37). It was hypothesized that E. coli RNases would fail to recognize divergent sequences on non-native rRNA transcripts, yielding immature or poorly processed heterologous ribosomes (FIG. 3B). Herein, it was discovered that substitution of these elements with their E. coli counterparts robustly corrected the rRNA processing defect and improved overall orthogonal translation activity.

[0167] To assess the impact of putative rRNA processing on heterologous ribosome function in E. coli, the native intergenic sequences of each of the 34 o-rRNAs were substituted with their corresponding E. coli sequences (FIG. 3B). Substitution of intergenic sequences for o-rRNAs with high 16S identity to E. coli (96.2-99.6%) exerted a minimal effect on sfGFP expression (FIG. 3C). However, replacement of intergenic sequences for moderately divergent o-rRNAs (81.5-96.2%) significantly increased sfGFP expression (FIG. 3D). Notably, many nonfunctional o-rRNAs yielded robust sfGFP activities only after intergenic sequence replacement, namely S. marcescens, V. cholerae, P. aeruginosa, A. baumannii, and B. cenocepacia. Replacement of intergenic sequences for highly divergent o-rRNAs (69.8-82.3%) failed to improve o-rRNA translation (FIG. 8), indicating that further engineering or supplementation with additional factors was necessary for improving the activity of these highly divergent heterologous ribosomes. Finally, the wildtype antiRBS was introduced into the 21 engineered intergenic sequence-bearing rRNAs for which the native counterparts were previously found to support SQ171 survival. Notably, it was found that SQ171 survival was maintained after intergenic sequence replacement, as was the relationship between SQ171 fitness and orthogonal translation activity (FIG. 3E). Taken together, these data indicated that rRNA processing limited the assembly of more divergent heterologous rRNAs into functional ribosomes, and that engineering processing sites significantly improved the activities of refractory heterologous ribosomes.

### Example 5: R-Protein Complementation Enhanced Heterologous Ribosome Activity

[0168] Highly divergent rRNAs (<80% 16S rRNA sequence identity to E. coli) failed to translate the orthogonal sfGFP transcript despite replacement of their intergenic sequences, indicating that the formation of functional heterologous ribosomes required supplementation with additional factors. As ribosomal proteins (r-proteins) are known to co-diverge alongside their cognate rRNA (38, 39, 40), it was hypothesized herein that E. coli r-proteins might only be capable of binding to and forming heterologous ribosomes with rRNAs sufficiently homologous to E. coli. Complementing highly divergent rRNAs with cognate r-proteins might therefore be expected to improve heterologous ribosome activity.

[0169] In prokaryotes, the majority of r-proteins are typically arranged on five operons (α, β, s10, spc, str). R-proteins encoded within these five operons account for ˜60% (12/21 SSU and 18/33 LSU in E. coli) of the full r-protein repertoire (31) with the remaining ˜40% distributed throughout the genome (FIG. 4A). Using A. baumannii o-rRNA bearing the E. coli intergenic sequences (30% activity vs. E. coli o-rRNA), potential improvements in activity were analyzed when expressing the full set of 55 cognate r-proteins distributed through seven plasmids: five corresponding to the naturally occurring r-protein operons and two artificial operons (AOs) encoding the remaining r-proteins (FIG. 4A). To capture potential epistatic interactions involving either SSU or LSU r-proteins, each artificial operon was enriched in either SSU (AO1) or LSU (AO2) r-proteins.

[0170] When tested alongside A. baumannii o-rRNA, only AbAO1 (comprising mostly SSU r-proteins) significantly improved sfGFP expression (FIG. 4B). Notably, complementation by a plasmid containing every A. baumannii SSU r-protein (S1-521) yielded similar levels of activity as AbAO1, which indicated that the latter contains all SSU r-proteins necessary to improve A. baumannii heterologous translation (FIG. 9A). Copy-up mutations (41) to AbAO1 further improved observed activity of this heterologous ribosome, exceeding the activity level of the E. coli o-rRNA (FIG. 9B). To identify specific r-proteins responsible for this increase in heterologous ribosome activity, r-proteins were sequentially deleted from AbAO1. Remarkably, it was identified that robust sfGFP activity was maintained in all instances (FIG. 9C), indicating that one or more r-proteins were functionally redundant. Analysis of individual r-proteins confirmed this assessment, highlighting that expression of either AbS20 or AbS16 improved A. baumannii heterologous o-ribosome activity to levels comparable to the E. coli o-rRNA (FIG. 4C).

[0171] It is notable that excessive protein overexpression alongside orthogonal translation circuits has pleiotropic consequences on apparent translational activity. Using mCherry as a surrogate for cognate r-protein overexpression alongside o-rRNA-dependent sfGFP production, a characteristic isocost line was observed that described the production of two proteins under the constraints of a restricted metabolic budget (FIG. 9D) (42). Furthermore, o-rRNA promoter choice dramatically affected orthogonal translation activity, as promoters with repetitive elements were rapidly recombined under high expression to mitigate the associated ribosome production burden (FIG. 9E).

[0172] This analysis was extended to A. macleodii o-rRNA bearing the E. coli intergenic sequences (17% activity vs. E. coli o-rRNA). Again it was found that only AmAO1 significantly improved sfGFP expression (FIG. 4D). As this finding indicated an overlap with A. baumannii r-proteins that improved heterologous ribosome function, AmAO1 constituent proteins were expressed alongside AmS20 and AmS16. It was found that combinations of either AmS20+AmS16+AmS1 or AmS20+AmS16+AmS15 were sufficient to improve A. macleodii o-rRNA function to levels comparable with the E. coli o-rRNA (FIG. 4E). A smaller but significant increase in apparent orthogonal translation activity was observed using AmAO2 (enriched in LSU r-proteins) (FIGS. 4D, 10A and 10B). However, AmAO2 r-proteins did not provide a comparable set of complementing r-proteins, as most genes contributed minor enhancements that collectively improved orthogonal translation activity (FIGS. 10B to 10E). These results confirmed that complementation with only a small number of cognate r-proteins exhibited significant effects on heterologous ribosome function in E. coli.

### Example 6: rRNA Divergence Predicted Rules for Cognate R-protein Complementation

[0173] The interface between rRNA and r-proteins is subject to extensive coevolution and divergence between related organisms (38-40). Accordingly, overlap between SSU r-protein complements that improved A. baumannii and A. macleodii o-rRNA activity indicated that the same r-proteins might improve the function of o-rRNAs derived from a variety of species. Indeed, the identified r-protein combinations improved activities of increasingly distant o-rRNAs: P. aeruginosa, V. cholerae, Marinospirillum minutulum, A. faecalis, B. cenocepacia, Neisseria gonorrhoeae, M. ferrooxydans, and Caulobacter crescentus (FIG. 4F).

[0174] Notably, this complete set of four r-proteins (S20, S16, S1 and S15) was not necessary for the observed improvement in activity for all evaluated o-rRNAs (FIGS. 11B and 11C). S20 and S16 are functionally redundant when expressed alongside cognate o-rRNAs derived from species more phylogenetically related to E. coli: V. cholerae, A. macleodii, M. minutulum, P. aeruginosa, and B. cenocepacia. Uniquely, S16 exhibited no effect on A. faecalis o-translation, where only S20 improved apparent activity. However, both proteins were necessary for enhanced activity when expressed alongside o-rRNAs derived from the more distant species N. gonorrheae, M. ferrooxydans, and C. crescentus (FIG. 11B). Extending the analysis to the complete set of four proteins, it was found that the addition of both S1 and S15 was necessary for maximal activities of V. cholerae and M. minutulum o-rRNAs, but neither r-protein had an effect when expressed alongside S20 and S16 for o-rRNAs derived from more divergent species (FIG. 8C).

[0175] To determine r-proteins necessary to complement more divergent o-rRNAs, the instantly disclosed operon-based complementation approach was extended to rRNAs derived from B. cenocepacia (betaproteobacteria; 81.5% 16S rRNA sequence ID to E. coli), Rickettsia parkeri (alphaproteobacteria; 76.8%), and Enterococcus faecalis (bacilli; 76.1%). However, a significant increase in orthogonal translation activity upon r-protein operon induction (FIGS. 5A to 5C) was not observed. Having found sequence divergence from E. coli to be a powerful predictor of relevant features for heterologous rRNA supplementation, 5 regions were then manually identified in the E. faecalis 16S rRNA possessing particularly low sequence identity to E. coli, via pairwise alignment (FIG. 12) (43). As these divergent elements make extensive contacts with r-proteins in the E. coli ribosome (PDB: 4YBB) (44), significant divergence from E. coli in these sequences indicated an inability to efficiently bind to the requisite r-proteins.

[0176] To validate the functional relevance of these helices, variants of the E. coli o-rRNA were constructed in which these helices were replaced with their cognate E. faecalis helices, with the discovery that orthogonal translation was abrogated in only 2 instances (transplantation of helices h9/h10 and h26, FIG. 5D). Seven r-proteins were expected to bind these helices based on existing ribosomal structures (EfS2, EfS8, EfS18, EfS12, EfS20, EfS16, and EfS17) (44), and indeed supplementation with this set yielded a detectable increase in orthogonal translation activity (FIG. 5E). The deletion of EfS8 and EfS18 from this set of proteins exerted no effect on activity, resulting in a set of 5 proteins that allowed E. faecalis o-rRNA activity to reach levels equivalent to 9.5% of the E. coli o-rRNA (FIG. 5E). Notably, this same set of 5 r-proteins was less effective than the combination of S20 and S16 for B. cenocepacia and M. ferrooxydans (81.5% and 80.1% 16S rRNA sequence identity to E. coli, respectively), but was more effective for the more distantly related R. parkeri (76.8%) and E. faecalis (76.1%) (FIG. 5F). Without wishing to be bound by theory, for o-rRNAs derived from more divergent organisms, the complete set of 5 r-proteins might be necessary to form a functional complex that cannot be formed by E. coli r-proteins. At the same time, for o-rRNAs more related to E. coli, cognate r-proteins might compete with E. coli proteins for binding, forming less functional ribosomes. This finding highlighted the importance of the instant disclosure's identification of the minimal subset of r-proteins necessary to improve function. Furthermore, it was noted that this set of 5 r-proteins was distributed across 2 naturally occurring operons in addition to the artificial operon AO1, obscuring these interactions from the 7-operon approach used above. Collectively, these results indicated that rRNA/r-protein codivergence was useful in predicting r-protein repertoires that enhanced the activity of heterologous ribosomes in E. coli.

### Example 7: Assessment of the Exchange Between E. coli and Heterologous Ribosome Subunits

[0177] The analysis of the instant disclosure provided guidelines to improve refractory heterologous ribosome function; however, exclusive identification of SSU r-proteins suggested that cognate heterologous LSUs were poorly active in E. coli. It was hypothesized that either E. coli LSUs interacted with heterologous SSUs to enable orthogonal translation, or, that because many heterologous rRNAs supported SQ171 strain survival, cognate heterologous LSUs were sufficiently active (FIGS. 1C, 2F, 3E and 14).

[0178] To assess the degree of association between E. coli LSUs and heterologous SSUs, an erythromycin-dependent reporter was developed to distinguish between genome- (E. coli; erythromycin-resistant) and episome-derived (heterologous; erythromycin-sensitive) LSUs. The erythromycin-resistant strain S4246 was developed, wherein all seven genomic 23S genes (rrlA-H) of 52060 cells were mutated (A2058U) (75) to mitigate macrolide binding in the ribosomal exit tunnel (FIG. 18A) (76, 77). rrlA-H A2058U sequences are presented in Table 1.

TABLE 1
rrlA-H A2058U Sequences

| Name | Sequence |
|---|---|
| rrlA | GGTTAAGCGACTAAGCGTACACGGTGGATGCCCTGGCAGTCAGAGGCG |
| A2058U | ATGAAGGACGTGCTAATCTGCGATAAGCGTCGGTAAGGTGATATGAAC |
| | CGTTATAACCGGCGATTTCCGAATGGGGAAACCCAGTGTGTTTCGACAC |
| | ACTATCATTAACTGAATCCATAGGTTAATGAGGCGAACCGGGGGAACT |
| | GAAACATCTAAGTACCCCGAGGAAAAGAAATCAACCGAGATTCCCCCA |
| | GTAGCGGCGAGCGAACGGGGAGCAGCCCAGAGCCTGAATCAGTGTGTG |
| | TGTTAGTGGAAGCGTCTGGAAAGGCGTGCGATACAGGGTGACAGCCCC |
| | GTACACAAAAATGCACATGCTGTGAGCTCGATGAGTAGGGCGGGACAC |
| | GTGGTATCCTGTCTGAATATGGGGGGACCATCCTCCAAGGCTAAATACT |
| | CCTGACTGACCGATAGTGAACCAGTACCGTGAGGGAAAGGCGAAAAGA |
| | ACCCCGGCGAGGGGAGTGAAAAAGAACCTGAAACCGTGTACGTACAAG |
| | CAGTGGGAGCACGCTTAGGCGTGTGACTGCGTACCTTTTGTATAATGGG |
| | TCAGCGACTTATATTCTGTAGCAAGGTTAACCGAATAGGGGAGCCGAA |
| | GGGAAACCGAGTCTTAACTGGGCGTTAAGTTGCAGGGTATAGACCCGA |
| | AACCCGGTGATCTAGCCATGGGCAGGTTGAAGGTTGGGTAACACTAAC |
| | TGGAGGACCGAACCGACTAATGTTGAAAAATTAGCGGATGACTTGTGG |
| | CTGGGGGTGAAAGGCCAATCAAACCGGGAGATAGCTGGTTCTCCCCGA |
| | AAGCTATTTAGGTAGCGCCTCGTGAATTCATCTCCGGGGGTAGAGCACT |
| | GTTTCGGCAAGGGGGTCATCCCGACTTACCAACCCGATGCAAACTGCGA |
| | ATACCGGAGAATGTTATCACGGGAGACACACGGCGGGTGCTAACGTCC |
| | GTCGTGAAGAGGGAAACAACCCAGACCGCCAGCTAAGGTCCCAAAGTC |
| | ATGGTTAAGTGGGAAACGATGTGGGAAGGCCCAGACAGCCAGGATGTT |
| | GGCTTAGAAGCAGCCATCATTTAAAGAAAGCGTAATAGCTCACTGGTC |
| | GAGTCGGCCTGCGCGGAAGATGTAACGGGGCTAAACCATGCACCGAAG |
| | CTGCGGCAGCGACACTATGTGTTGTTGGGTAGGGGAGCGTTCTGTAAGC |
| | CTGTGAAGGTGTGCTGTGAGGCATGCTGGAGGTATCAGAAGTGCGAAT |
| | GCTGACATAAGTAACGATAAAGCGGGTGAAAAGCCCGCTCGCCGGAAG |
| | ACCAAGGGTTCCTGTCCAACGTTAATCGGGGCAGGGTGAGTCGACCCCT |
| | AAGGCGAGGCCGAAAGGCGTAGTCGATGGGAAACAGGTTAATATTCCT |
| | GTACTTGGTGTTACTGCGAAGGGGGGACGGAGAAGGCTATGTTGGCCG |
| | GGCGACGGTTGTCCCGGTTTAAGCGTGTAGGCTGGTTTTCCAGGCAAAT |
| | CCGGAAAATCAAGGCTGAGGCGTGATGACGAGGCACTACGGTGCTGAA |
| | GCAACAAATGCCCTGCTTCCAGGAAAAGCCTCTAAGCATCAGGTAACA |
| | TCAAATCGTACCCCAAACCGACACAGGTGGTCAGGTAGAGAATACCAA |
| | GGCGCTTGAGAGAACTCGGGTGAAGGAACTAGGCAAAATGGTGCCGTA |
| | ACTTCGGGAGAAGGCACGCTGATATGTAGGTGAAGCGACTTGCTCGTG |
| | GAGCTGAAATCAGTCGAAGATACCAGCTGGCTGCAACTGTTTATTAAAA |
| | ACACAGCACTGTGCAAACACGAAAGTGGACGTATACGGTGTGACGCCT |
| | GCCCGGTGCCGGAAGGTTAATTGATGGGGTTAGCCGCAAGGCGAAGCT |
| | CTTGATCGAAGCCCCGGTAAACGGCGGCCGTAACTATAACGGTCCTAA |
| | GGTAGCGAAATTCCTTGTCGGGTAAGTTCCGACCTGCACGAATGGCGTA |
| | ATGATGGCCAGGCTGTCTCCACCCGAGACTCAGTGAAATTGAACTCGCT |
| | GTGAAGATGCAGTGTACCCGCGGCAAGACGGTAAGACCCCGTGAACCT |
| | TTACTATAGCTTGACACTGAACATTGAGCCTTGATGTGTAGGATAGGTG |
| | GGAGGCTTTGAAGTGTGGACGCCAGTCTGCATGGAGCCGACCTTGAAA |
| | TACCACCCTTTAATGTTTGATGTTCTAACGTTGACCCGTAATCCGGGTTG |
| | CGGACAGTGTCTGGTGGGTAGTTTGACTGGGGCGGTCTCCTCCTAAAGA |
| | GTAACGGAGGAGCACGAAGGTTGGCTAATCCTGGTCGGACATCAGGAG |
| | GTTAGTGCAATGGCATAAGCCAGCTTGACTGCGAGCGTGACGGCGCGA |
| | GCAGGTGCGAAAGCAGGTCATAGTGATCCGGTGGTTCTGAATGGAAGG |
| | GCCATCGCTCAACGGATAAAAGGTACTCCGGGGATAACAGGCTGATAC |
| | CGCCCAAGAGTTCATATCGACGGCGGTGTTTGGCACCTCGATGTCGGCT |
| | CATCACATCCTGGGGCTGAAGTAGGTCCCAAGGGTATGGCTGTTCGCCA |
| | TTTAAAGTGGTACGCGAGCTGGGTTTAGAACGTCGTGAGACAGTTCGGT |
| | CCCTATCTGCCGTGGGCGCTGGAGAACTGAGGGGGGCTGCTCCTAGTAC |
| | GAGAGGACCGGAGTGGACGCATCACTGGTGTTCGGGTTGTCATGCCAA |
| | TGGCACTGCCCGGTAGCTAAATGCGGAAGAGATAAGTGCTGAAAGCAT |
| | CTAAGCACGAAACTTGCCCCGAGATGAGTTCTCCCTGACTCCTTGAGAG |
| | TCCTGAAGGAACGTTGAAGACGACGACGTTGATAGGCCGGGTGTGTAA |
| | GCGCAGCGATGCGTTGAGCTAACCGGTACTAATGAACCGTGAGGCTTA |
| | ACCTT (SEQ ID NO: 388) |
| rrlB | GGTTAAGCGACTAAGCGTACACGGTGGATGCCCTGGCAGTCAGAGGCG |
| A2058U | ATGAAGGACGTGCTAATCTGCGATAAGCGTCGGTAAGGTGATATGAAC |
| | CGTTATAACCGGCGATTTCCGAATGGGGAAACCCAGTGTGTTTCGACAC |
| | ACTATCATTAACTGAATCCATAGGTTAATGAGGCGAACCGGGGGAACT |
| | GAAACATCTAAGTACCCCGAGGAAAAGAAATCAACCGAGATTCCCCCA |
| | GTAGCGGCGAGCGAACGGGGAGCAGCCCAGAGCCTGAATCAGTGTGTG |
| | TGTTAGTGGAAGCGTCTGGAAAGGCGCGCGATACAGGGTGACAGCCCC |
| | GTACACAAAAATGCACATGCTGTGAGCTCGATGAGTAGGGCGGGACAC |
| | GTGGTATCCTGTCTGAATATGGGGGGACCATCCTCCAAGGCTAAATACT |
| | CCTGACTGACCGATAGTGAACCAGTACCGTGAGGGAAAGGCGAAAAGA |
| | ACCCCGGCGAGGGGAGTGAAAAAGAACCTGAAACCGTGTACGTACAAG |
| | CAGTGGGAGCACGCTTAGGCGTGTGACTGCGTACCTTTTGTATAATGGG |
| | TCAGCGACTTATATTCTGTAGCAAGGTTAACCGAATAGGGGAGCCGAA |
| | GGGAAACCGAGTCTTAACTGGGCGTTAAGTTGCAGGGTATAGACCCGA |
| | AACCCGGTGATCTAGCCATGGGCAGGTTGAAGGTTGGGTAACACTAAC |
| | TGGAGGACCGAACCGACTAATGTTGAAAAATTAGCGGATGACTTGTGG |
| | CTGGGGGTGAAAGGCCAATCAAACCGGGAGATAGCTGGTTCTCCCCGA |
| | AAGCTATTTAGGTAGCGCCTCGTGAATTCATCTCCGGGGGTAGAGCACT |
| | GTTTCGGCAAGGGGGTCATCCCGACTTACCAACCCGATGCAAACTGCGA |
| | ATACCGGAGAATGTTATCACGGGAGACACACGGCGGGTGCTAACGTCC |
| | GTCGTGAAGAGGGAAACAACCCAGACCGCCAGCTAAGGTCCCAAAGTC |
| | ATGGTTAAGTGGGAAACGATGTGGGAAGGCCCAGACAGCCAGGATGTT |
| | GGCTTAGAAGCAGCCATCATTTAAAGAAAGCGTAATAGCTCACTGGTC |
| | GAGTCGGCCTGCGCGGAAGATGTAACGGGGCTAAACCATGCACCGAAG |
| | CTGCGGCAGCGACGCTTATGCGTTGTTGGGTAGGGGAGCGTTCTGTAAG |
| | CCTGCGAAGGTGTGCTGTGAGGCATGCTGGAGGTATCAGAAGTGCGAA |
| | TGCTGACATAAGTAACGATAAAGCGGGTGAAAAGCCCGCTCGCCGGAA |
| | GACCAAGGGTTCCTGTCCAACGTTAATCGGGGCAGGGTGAGTCGACCC |
| | CTAAGGCGAGGCCGAAAGGCGTAGTCGATGGGAAACAGGTTAATATTC |
| | CTGTACTTGGTGTTACTGCGAAGGGGGGACGGAGAAGGCTATGTTGGC |
| | CGGGCGACGGTTGTCCCGGTTTAAGCGTGTAGGCTGGTTTTCCAGGCAA |
| | ATCCGGAAAATCAAGGCTGAGGCGTGATGACGAGGCACTACGGTGCTG |
| | AAGCAACAAATGCCCTGCTTCCAGGAAAAGCCTCTAAGCATCAGGTAA |
| | CATCAAATCGTACCCCAAACCGACACAGGTGGTCAGGTAGAGAATACC |
| | AAGGCGCTTGAGAGAACTCGGGTGAAGGAACTAGGCAAAATGGTGCCG |
| | TAACTTCGGGAGAAGGCACGCTGATATGTAGGTGAGGTCCCTCGCGGA |
| | TGGAGCTGAAATCAGTCGAAGATACCAGCTGGCTGCAACTGTTTATTAA |
| | AAACACAGCACTGTGCAAACACGAAAGTGGACGTATACGGTGTGACGC |
| | CTGCCCGGTGCCGGAAGGTTAATTGATGGGGTTAGCGCAAGCGAAGCT |
| | CTTGATCGAAGCCCCGGTAAACGGCGGCCGTAACTATAACGGTCCTAA |
| | GGTAGCGAAATTCCTTGTCGGGTAAGTTCCGACCTGCACGAATGGCGTA |
| | ATGATGGCCAGGCTGTCTCCACCCGAGACTCAGTGAAATTGAACTCGCT |
| | GTGAAGATGCAGTGTACCCGCGGCAAGACGGTAAGACCCCGTGAACCT |
| | TTACTATAGCTTGACACTGAACATTGAGCCTTGATGTGTAGGATAGGTG |
| | GGAGGCTTTGAAGTGTGGACGCCAGTCTGCATGGAGCCGACCTTGAAA |
| | TACCACCCTTTAATGTTTGATGTTCTAACGTTGACCCGTAATCCGGGTTG |
| | CGGACAGTGTCTGGTGGGTAGTTTGACTGGGGCGGTCTCCTCCTAAAGA |
| | GTAACGGAGGAGCACGAAGGTTGGCTAATCCTGGTCGGACATCAGGAG |
| | GTTAGTGCAATGGCATAAGCCAGCTTGACTGCGAGCGTGACGGCGCGA |
| | GCAGGTGCGAAAGCAGGTCATAGTGATCCGGTGGTTCTGAATGGAAGG |
| | GCCATCGCTCAACGGATAAAAGGTACTCCGGGGATAACAGGCTGATAC |
| | CGCCCAAGAGTTCATATCGACGGCGGTGTTTGGCACCTCGATGTCGGCT |
| | CATCACATCCTGGGGCTGAAGTAGGTCCCAAGGGTATGGCTGTTCGCCA |
| | TTTAAAGTGGTACGCGAGCTGGGTTTAGAACGTCGTGAGACAGTTCGGT |
| | CCCTATCTGCCGTGGGCGCTGGAGAACTGAGGGGGGCTGCTCCTAGTAC |
| | GAGAGGACCGGAGTGGACGCATCACTGGTGTTCGGGTTGTCATGCCAA |
| | TGGCACTGCCCGGTAGCTAAATGCGGAAGAGATAAGTGCTGAAAGCAT |
| | CTAAGCACGAAACTTGCCCCGAGATGAGTTCTCCCTGACCCTTTAAGGG |
| | TCCTGAAGGAACGTTGAAGACGACGACGTTGATAGGCCGGGTGTGTAA |
| | GCGCAGCGATGCGTTGAGCTAACCGGTACTAATGAACCGTGAGGCTTA |
| | ACCTT (SEQ ID NO: 390) |
| rrlC | GGTTAAGCGACTAAGCGTACACGGTGGATGCCCTGGCAGTCAGAGGCG |
| A2058U | ATGAAGGACGTGCTAATCTGCGATAAGCGTCGGTAAGGTGATATGAAC |
| | CGTTATAACCGGCGATTTCCGAATGGGGAAACCCAGTGTGTTTCGACAC |
| | ACTATCATTAACTGAATCCATAGGTTAATGAGGCGAACCGGGGGAACT |
| | GAAACATCTAAGTACCCCGAGGAAAAGAAATCAACCGAGATTCCCCCA |
| | GTAGCGGCGAGCGAACGGGGAGCAGCCCAGAGCCTGAATCAGTATGTG |
| | TGTTAGTGGAAGCGTCTGGAAAGGCGCGCGATACAGGGTGACAGCCCC |
| | GTACACAAAAATGCACATATTGTGAGCTCGATGAGTAGGGCGGGACAC |
| | GTGGTATCCTGTCTGAATATGGGGGGACCATCCTCCAAGGCTAAATACT |
| | CCTGACTGACCGATAGTGAACCAGTACCGTGAGGGAAAGGCGAAAAGA |
| | ACCCCGGCGAGGGGAGTGAAAAAGAACCTGAAACCGTGTACGTACAAG |
| | CAGTGGGAGCACGCTTAGGCGTGTGACTGCGTACCTTTTGTATAATGGG |
| | TCAGCGACTTATATTCTGTAGCAAGGTTAACCGAATAGGGGAGCCGAA |
| | GGGAAACCGAGTCTTAACTGGGCGTTAAGTTGCAGGGTATAGACCCGA |
| | AACCCGGTGATCTAGCCATGGGCAGGTTGAAGGTTGGGTAACACTAAC |
| | TGGAGGACCGAACCGACTAATGTTGAAAAATTAGCGGATGACTTGTGG |
| | CTGGGGGTGAAAGGCCAATCAAACCGGGAGATAGCTGGTTCTCCCCGA |
| | AAGCTATTTAGGTAGCGCCTCGTGAATTCATCTCCGGGGGTAGAGCACT |
| | GTTTCGGCAAGGGGGTCATCCCGACTTACCAACCCGATGCAAACTGCGA |
| | ATACCGGAGAATGTTATCACGGGAGACACACGGCGGGTGCTAACGTCC |
| | GTCGTGAAGAGGGAAACAACCCAGACCGCCAGCTAAGGTCCCAAAGTC |
| | ATGGTTAAGTGGGAAACGATGTGGGAAGGCCCAGACAGCCAGGATGTT |
| | GGCTTAGAAGCAGCCATCATTTAAAGAAAGCGTAATAGCTCACTGGTC |
| | GAGTCGGCCTGCGCGGAAGATGTAACGGGGCTAAACCATGCACCGAAG |
| | CTGCGGCAGCGACGCTTATGCGTTGTTGGGTAGGGGAGCGTTCTGTAAG |
| | CCTGCGAAGGTGTGCTGTGAGGCATGCTGGAGGTATCAGAAGTGCGAA |
| | TGCTGACATAAGTAACGATAAAGCGGGTGAAAAGCCCGCTCGCCGGAA |
| | GACCAAGGGTTCCTGTCCAACGTTAATCGGGGCAGGGTGAGTCGACCC |
| | CTAAGGCGAGGCCGAAAGGCGTAGTCGATGGGAAACAGGTTAATATTC |
| | CTGTACTTGGTGTTACTGCGAAGGGGGGACGGAGAAGGCTATGTTGGC |
| | CGGGCGACGGTTGTCCCGGTTTAAGCGTGTAGGCTGGTTTTCCAGGCAA |
| | ATCCGGAAAATCAAGGCTGAGGCGTGATGACGAGGCACTACGGTGCTG |
| | AAGCAACAAATGCCCTGCTTCCAGGAAAAGCCTCTAAGCATCAGGTAA |
| | CATCAAATCGTACCCCAAACCGACACAGGTGGTCAGGTAGAGAATACC |
| | AAGGCGCTTGAGAGAACTCGGGTGAAGGAACTAGGCAAAATGGTGCCG |
| | TAACTTCGGGAGAAGGCACGCTGATATGTAGGTGAAGCGACTTGCTCGT |
| | GGAGCTGAAATCAGTCGAAGATACCAGCTGGCTGCAACTGTTTATTAAA |
| | AACACAGCACTGTGCAAACACGAAAGTGGACGTATACGGTGTGACGCC |
| | TGCCCGGTGCCGGAAGGTTAATTGATGGGGTCAGCGCAAGCGAAGCTC |
| | TTGATCGAAGCCCCGGTAAACGGCGGCCGTAACTATAACGGTCCTAAG |
| | GTAGCGAAATTCCTTGTCGGGTAAGTTCCGACCTGCACGAATGGCGTAA |
| | TGATGGCCAGGCTGTCTCCACCCGAGACTCAGTGAAATTGAACTCGCTG |
| | TGAAGATGCAGTGTACCCGCGGCAAGACGGTAAGACCCCGTGAACCTT |
| | TACTATAGCTTGACACTGAACATTGAGCCTTGATGTGTAGGATAGGTGG |
| | GAGGCTTTGAAGTGTGGACGCCAGTCTGCATGGAGCCGACCTTGAAAT |
| | ACCACCCTTTAATGTTTGATGTTCTAACGTGGACCCGTGATCCGGGTTG |
| | CGGACAGTGTCTGGTGGGTAGTTTGACTGGGGCGGTCTCCTCCTAAAGA |
| | GTAACGGAGGAGCACGAAGGTTGGCTAATCCTGGTCGGACATCAGGAG |
| | GTTAGTGCAATGGCATAAGCCAGCTTGACTGCGAGCGTGACGGCGCGA |
| | GCAGGTGCGAAAGCAGGTCATAGTGATCCGGTGGTTCTGAATGGAAGG |
| | GCCATCGCTCAACGATAAAAGGTACTCCGGGGATAACAGGCTGATAC |
| | CGCCCAAGAGTTCATATCGACGGCGGTGTTTGGCACCTCGATGTCGGCT |
| | CATCACATCCTGGAGCTGAAGTAGGTCCCAAGGGTATGGCTGTTCGCCA |
| | TTTAAAGTGGTACGCGAGCTGGGTTTAGAACGTCGTGAGACAGTTCGGT |
| | CCCTATCTGCCGTGGGCGCTGGAGAACTGAGGGGGGCTGCTCCTAGTAC |
| | GAGAGGACCGGAGTGGACGCATCACTGGTGTTCGGGTTGTCATGCCAA |
| | TGGCACTGCCCGGTAGCTAAATGCGGAAGAGATAAGTGCTGAAAGCAT |
| | CTAAGCACGAAACTTGCCCCGAGATGAGTTCTCCCTGACTCCTTGAGAG |
| | TCCTGAAGGAACGTTGAAGACGACGACGTTGATAGGCCGGGTGTGTAA |
| | GCGCAGCGATGCGTTGAGCTAACCGGTACTAATGAACCGTGAGGCTTA |
| | ACCTT (SEQ ID NO: 392) |
| rrlD | GGTTAAGCGACTAAGCGTACACGGTGGATGCCCTGGCAGTCAGAGGCG |
| A2058U | ATGAAGGACGTGCTAATCTGCGATAAGCGTCGGTAAGGTGATATGAAC |
| | CGTTATAACCGGCGATTTCCGAATGGGGAAACCCAGTGTGTTTCGACAC |
| | ACTATCATTAACTGAATCCATAGGTTAATGAGGCGAACCGGGGGAACT |
| | GAAACATCTAAGTACCCCGAGGAAAAGAAATCAACCGAGATTCCCCCA |
| | GTAGCGGCGAGCGAACGGGGAGCAGCCCAGAGCCTGAATCAGTGTGTG |
| | TGTTAGTGGAAGCGTCTGGAAAGGCGCGCGATACAGGGTGACAGCCCC |
| | GTACACAAAAATGCACATGCTGTGAGCTCGATGAGTAGGGCGGGACAC |
| | GTGGTATCCTGTCTGAATATGGGGGGACCATCCTCCAAGGCTAAATACT |
| | CCTGACTGACCGATAGTGAACCAGTACCGTGAGGGAAAGGCGAAAAGA |
| | ACCCCGGCGAGGGGAGTGAAAAAGAACCTGAAACCGTGTACGTACAAG |
| | CAGTGGGAGCACGCTTAGGCGTGTGACTGCGTACCTTTTGTATAATGGG |
| | TCAGCGACTTATATTCTGTAGCAAGGTTAACCGAATAGGGGAGCCGAA |
| | GGGAAACCGAGTCTTAACTGGGCGTTAAGTTGCAGGGTATAGACCCGA |
| | AACCCGGTGATCTAGCCATGGGCAGGTTGAAGGTTGGGTAACACTAAC |
| | TGGAGGACCGAACCGACTAATGTTGAAAAATTAGCGGATGACTTGTGG |
| | CTGGGGGTGAAAGGCCAATCAAACCGGGAGATAGCTGGTTCTCCCCGA |
| | AAGCTATTTAGGTAGCGCCTCGTGAATTCATCTCCGGGGGTAGAGCACT |
| | GTTTCGGCAAGGGGGTCATCCCGACTTACCAACCCGATGCAAACTGCGA |
| | ATACCGGAGAATGTTATCACGGGAGACACACGGCGGGTGCTAACGTCC |
| | GTCGTGAAGAGGGAAACAACCCAGACCGCCAGCTAAGGTCCCAAAGTC |
| | ATGGTTAAGTGGGAAACGATGTGGGAAGGCCCAGACAGCCAGGATGTT |
| | GGCTTAGAAGCAGCCATCATTTAAAGAAAGCGTAATAGCTCACTGGTC |
| | GAGTCGGCCTGCGCGGAAGATGTAACGGGGCTAAACCATGCACCGAAG |
| | CTGCGGCAGCGACGCTTATGCGTTGTTGGGTAGGGGAGCGTTCTGTAAG |
| | CCTGCGAAGGTGTGCTGTGAGGCATGCTGGAGGTATCAGAAGTGCGAA |
| | TGCTGACATAAGTAACGATAAAGCGGGTGAAAAGCCCGCTCGCCGGAA |
| | GACCAAGGGTTCCTGTCCAACGTTAATCGGGGCAGGGTGAGTCGACCC |
| | CTAAGGCGAGGCCGAAAGGCGTAGTCGATGGGAAACAGGTTAATATTC |
| | CTGTACTTGGTGTTACTGCGAAGGGGGGACGGAGAAGGCTATGTTGGC |
| | CGGGCGACGGTTGTCCCGGTTTAAGCGTGTAGGCTGGTTTTCCAGGCAA |
| | ATCCGGAAAATCAAGGCTGAGGCGTGATGACGAGGCACTACGGTGCTG |
| | AAGCAACAAATGCCCTGCTTCCAGGAAAAGCCTCTAAGCATCAGGTAA |
| | CATCAAATCGTACCCCAAACCGACACAGGTGGTCAGGTAGAGAATACC |
| | AAGGCGCTTGAGAGAACTCGGGTGAAGGAACTAGGCAAAATGGTGCCG |
| | TAACTTCGGGAGAAGGCACGCTGATATGTAGGTGAAGCGACTTGCTCGT |
| | GGAGCTGAAATCAGTCGAAGATACCAGCTGGCTGCAACTGTTTATTAAA |
| | AACACAGCACTGTGCAAACACGAAAGTGGACGTATACGGTGTGACGCC |
| | TGCCCGGTGCCGGAAGGTTAATTGATGGGGTTAGCGCAAGCGAAGCTC |
| | TTGATCGAAGCCCCGGTAAACGGCGGCCGTAACTATAACGGTCCTAAG |
| | GTAGCGAAATTCCTTGTCGGGTAAGTTCCGACCTGCACGAATGGCGTAA |
| | TGATGGCCAGGCTGTCTCCACCCGAGACTCAGTGAAATTGAACTCGCTG |
| | TGAAGATGCAGTGTACCCGCGGCAAGACGGTAAGACCCCGTGAACCTT |
| | TACTATAGCTTGACACTGAACATTGAGCCTTGATGTGTAGGATAGGTGG |
| | GAGGCTTAGAAGTGTGGACGCCAGTCTGCATGGAGCCGACCTTGAAAT |
| | ACCACCCTTTAATGTTTGATGTTCTAACGTTGACCCGTAATCCGGGTTGC |
| | GGACAGTGTCTGGTGGGTAGTTTGACTGGGGCGGTCTCCTCCTAAAGAG |
| | TAACGGAGGAGCACGAAGGTTGGCTAATCCTGGTCGGACATCAGGAGG |
| | TTAGTGCAATGGCATAAGCCAGCTTGACTGCGAGCGTGACGGCGCGAG |
| | CAGGTGCGAAAGCAGGTCATAGTGATCCGGTGGTTCTGAATGGAAGGG |
| | CCATCGCTCAACGGATAAAAGGTACTCCGGGGATAACAGGCTGATACC |
| | GCCCAAGAGTTCATATCGACGGCGGTGTTTGGCACCTCGATGTCGGCTC |
| | ATCACATCCTGGGGCTGAAGTAGGTCCCAAGGGTGATGCTGTTCGCCAT |
| | TTAAAGTGGTACGCGAGCTGGGTTTAGAACGTCGTGAGACAGTTCGGTC |
| | CCTATCTGCCGTGGGCGCTGGAGAACTGAGGGGGGCTGCTCCTAGTACG |
| | AGAGGACCGGAGTGGACGCATCACTGGTGTTCGGGTTGTCATGCCAAT |
| | GGCACTGCCCGGTAGCTAAATGCGGAAGAGATAAGTGCTGAAAGCATC |
| | TAAGCACGAAACTTGCCCCGAGATGAGTTCTCCCTGACCCTTTAAGGGT |
| | CCTGAAGGAACGTTGAAGACGACGACGTTGATAGGCCGGGTGTGTAAG |
| | CGCAGCGATGCGTTGAGCTAACCGGTACTAATGAACCGTGAGGCTTAA |
| | CCTT (SEQ ID NO: 394) |
| rrlE | GGTTAAGCGACTAAGCGTACACGGTGGATGCCCTGGCAGTCAGAGGCG |
| A2058U | ATGAAGGACGTGCTAATCTGCGATAAGCGTCGGTAAGGTGATATGAAC |
| | CGTTATAACCGGCGATTTCCGAATGGGGAAACCCAGTGTGTTTCGACAC |
| | ACTATCATTAACTGAATCCATAGGTTAATGAGGCGAACCGGGGGAACT |
| | GAAACATCTAAGTACCCCGAGGAAAAGAAATCAACCGAGATTCCCCCA |
| | GTAGCGGCGAGCGAACGGGGAGCAGCCCAGAGCCTGAATCAGTGTGTG |
| | TGTTAGTGGAAGCGTCTGGAAAGGCGCGCGATACAGGGTGACAGCCCC |
| | GTACACAAAAATGCACATGCTGTGAGCTCGATGAGTAGGGCGGGACAC |
| | GTGGTATCCTGTCTGAATATGGGGGGACCATCCTCCAAGGCTAAATACT |
| | CCTGACTGACCGATAGTGAACCAGTACCGTGAGGGAAAGGCGAAAAGA |
| | ACCCCGGCGAGGGGAGTGAAAAAGAACCTGAAACCGTGTACGTACAAG |
| | CAGTGGGAGCACGCTTAGGCGTGTGACTGCGTACCTTTTGTATAATGGG |
| | TCAGCGACTTATATTCTGTAGCAAGGTTAACCGAATAGGGGAGCCGAA |
| | GGGAAACCGAGTCTTAACTGGGCGTTAAGTTGCAGGGTATAGACCCGA |
| | AACCCGGTGATCTAGCCATGGGCAGGTTGAAGGTTGGGTAACACTAAC |
| | TGGAGGACCGAACCGACTAATGTTGAAAAATTAGCGGATGACTTGTGG |
| | CTGGGGGTGAAAGGCCAATCAAACCGGGAGATAGCTGGTTCTCCCCGA |
| | AAGCTATTTAGGTAGCGCCTCGTGAATTCATCTCCGGGGGTAGAGCACT |
| | GTTTCGGCAAGGGGGTCATCCCGACTTACCAACCCGATGCAAACTGCGA |
| | ATACCGGAGAATGTTATCACGGGAGACACACGGCGGGTGCTAACGTCC |
| | GTCGTGAAGAGGGAAACAACCCAGACCGCCAGCTAAGGTCCCAAAGTC |
| | ATGGTTAAGTGGGAAACGATGTGGGAAGGCCCAGACAGCCAGGATGTT |
| | GGCTTAGAAGCAGCCATCATTTAAAGAAAGCGTAATAGCTCACTGGTC |
| | GAGTCGGCCTGCGCGGAAGATGTAACGGGGCTAAACCATGCACCGAAG |
| | CTGCGGCAGCGACGCTTATGCGTTGTTGGGTAGGGGAGCGTTCTGTAAG |
| | CCTGCGAAGGTGTGCTGTGAGGCATGCTGGAGGTATCAGAAGTGCGAA |
| | TGCTGACATAAGTAACGATAAAGCGGGTGAAAAGCCCGCTCGCCGGAA |
| | GACCAAGGGTTCCTGTCCAACGTTAATCGGGGCAGGGTGAGTCGACCC |
| | CTAAGGCGAGGCCGAAAGGCGTAGTCGATGGGAAACAGGTTAATATTC |
| | CTGTACTTGGTGTTACTGCGAAGGGGGGACGGAGAAGGCTATGTTGGC |
| | CGGGCGACGGTTGTCCCGGTTTAAGCGTGTAGGCTGGTTTTCCAGGCAA |
| | ATCCGGAAAATCAAGGCTGAGGCGTGATGACGAGGCACTACGGTGCTG |
| | AAGCAACAAATGCCCTGCTTCCAGGAAAAGCCTCTAAGCATCAGGTAA |
| | CATCAAATCGTACCCCAAACCGACACAGGTGGTCAGGTAGAGAATACC |
| | AAGGCGCTTGAGAGAACTCGGGTGAAGGAACTAGGCAAAATGGTGCCG |
| | TAACTTCGGGAGAAGGCACGCTGATATGTAGGTGAGGTCCCTCGCGGA |
| | TGGAGCTGAAATCAGTCGAAGATACCAGCTGGCTGCAACTGTTTATTAA |
| | AAACACAGCACTGTGCAAACACGAAAGTGGACGTATACGGTGTGACGC |
| | CTGCCCGGTGCCGGAAGGTTAATTGATGGGGTTAGCGCAAGCGAAGCT |
| | CTTGATCGAAGCCCCGGTAAACGGCGGCCGTAACTATAACGGTCCTAA |
| | GGTAGCGAAATTCCTTGTCGGGTAAGTTCCGACCTGCACGAATGGCGTA |
| | ATGATGGCCAGGCTGTCTCCACCCGAGACTCAGTGAAATTGAACTCGCT |
| | GTGAAGATGCAGTGTACCCGCGGCAAGACGGTAAGACCCCGTGAACCT |
| | TTACTATAGCTTGACACTGAACATTGAGCCTTGATGTGTAGGATAGGTG |
| | GGAGGCTTTGAAGTGTGGACGCCAGTCTGCATGGAGCCGACCTTGAAA |
| | TACCACCCTTTAATGTTTGATGTTCTAACGTTGACCCGTAATCCGGGTTG |
| | CGGACAGTGTCTGGTGGGTAGTTTGACTGGGGCGGTCTCCTCCTAAAGA |
| | GTAACGGAGGAGCACGAAGGTTGGCTAATCCTGGTCGGACATCAGGAG |
| | GTTAGTGCAATGGCATAAGCCAGCTTGACTGCGAGCGTGACGGCGCGA |
| | GCAGGTGCGAAAGCAGGTCATAGTGATCCGGTGGTTCTGAATGGAAGG |
| | GCCATCGCTCAACGGATAAAAGGTACTCCGGGGATAACAGGCTGATAC |
| | CGCCCAAGAGTTCATATCGACGGCGGTGTTTGGCACCTCGATGTCGGCT |
| | CATCACATCCTGGGGCTGAAGTAGGTCCCAAGGGTATGGCTGTTCGCCA |
| | TTTAAAGTGGTACGCGAGCTGGGTTTAGAACGTCGTGAGACAGTTCGGT |
| | CCCTATCTGCCGTGGGCGCTGGAGAACTGAGGGGGGCTGCTCCTAGTAC |
| | GAGAGGACCGGAGTGGACGCATCACTGGTGTTCGGGTTGTCATGCCAA |
| | TGGCACTGCCCGGTAGCTAAATGCGGAAGAGATAAGTGCTGAAAGCAT |
| | CTAAGCACGAAACTTGCCCCGAGATGAGTTCTCCCTGACTCCTTGAGAG |
| | TCCTGAAGGAACGTTGAAGACGACGACGTTGATAGGCCGGGTGTGTAA |
| | GCGCAGCGATGCGTTGAGCTAACCGGTACTAATGAACCGTGAGGCTTA |
| | ACCTT (SEQ ID NO: 396) |
| rrlG | GGTTAAGCGACTAAGCGTACACGGTGGATGCCCTGGCAGTCAGAGGCG |
| A2058U | ATGAAGGACGTGCTAATCTGCGATAAGCGTCGGTAAGGTGATATGAAC |
| | CGTTATAACCGGCGATTTCCGAATGGGGAAACCCAGTGTGTTTCGACAC |
| | ACTATCATTAACTGAATCCATAGGTTAATGAGGCGAACCGGGGGAACT |
| | GAAACATCTAAGTACCCCGAGGAAAAGAAATCAACCGAGATTCCCCCA |
| | GTAGCGGCGAGC GAACGGGGAGCAGCCCAGAGCCTGAATCAGTGTGTG |
| | TGTTAGTGGAAGCGTCTGGAAAGGCGCGCGATACAGGGTGACAGCCCC |
| | GTACACAAAAATGCACATGCTGTGAGCTCGATGAGTAGGGCGGGACAC |
| | GTGGTATCCTGTCTGAATATGGGGGGACCATCCTCCAAGGCTAAATACT |
| | CCTGACTGACCGATAGTGAACCAGTACCGTGAGGGAAAGGCGAAAAGA |
| | ACCCCGGCGAGGGGAGTGAAAAAGAACCTGAAACCGTGTACGTACAAG |
| | CAGTGGGAGCACGCTTAGGCGTGTGACTGCGTACCTTTTGTATAATGGG |
| | TCAGCGACTTATATTCTGTAGCAAGGTTAACCGAATAGGGGAGCCGAA |
| | GGGAAACCGAGTCTTAACTGGGCGTTAAGTTGCAGGGTATAGACCCGA |
| | AACCCGGTGATCTAGCCATGGGCAGGTTGAAGGTTGGGTAACACTAAC |
| | TGGAGGACCGAACCGACTAATGTTGAAAAATTAGCGGATGACTTGTGG |
| | CTGGGGGTGAAAGGCCAATCAAACCGGGAGATAGCTGGTTCTCCCCGA |
| | AAGCTATTTAGGTAGCGCCTCGTGAATTCATCTCCGGGGGTAGAGCACT |
| | GTTTCGGCAAGGGGGTCATCCCGACTTACCAACCCGATGCAAACTGCGA |
| | ATACCGGAGAATGTTATCACGGGAGACACACGGCGGGTGCTAACGTCC |
| | GTCGTGAAGAGGGAAACAACCCAGACCGCCAGCTAAGGTCCCAAAGTC |
| | ATGGTTAAGTGGGAAACGATGTGGGAAGGCCCAGACAGCCAGGATGTT |
| | GGCTTAGAAGCAGCCATCATTTAAAGAAAGCGTAATAGCTCACTGGTC |
| | GAGTCGGCCTGCGCGGAAGATGTAACGGGGCTAAACCATGCACCGAAG |
| | CTGCGGCAGCGACGCTTATGCGTTGTTGGGTAGGGGAGCGTTCTGTAAG |
| | CCTGCGAAGGTGTGCTGTGAGGCATGCTGGAGGTATCAGAAGTGCGAA |
| | TGCTGACATAAGTAACGATAAAGCGGGTGAAAAGCCCGCTCGCCGGAA |
| | GACCAAGGGTTCCTGTCCAACGTTAATCGGGGCAGGGTGAGTCGACCC |
| | CTAAGGCGAGGCCGAAAGGCGTAGTCGATGGGAAACAGGTTAATATTC |
| | CTGTACTTGGTGTTACTGCGAAGGGGGGACGGAGAAGGCTATGTTGGC |
| | CGGGCGACGGTTGTCCCGGTTTAAGCGTGTAGGCTGGTTTTCCAGGCAA |
| | ATCCGGAAAATCAAGGCTGAGGCGTGATGACGAGGCACTACGGTGCTG |
| | AAGCAACAAATGCCCTGCTTCCAGGAAAAGCCTCTAAGCATCAGGTAA |
| | CATCAAATCGTACCCCAAACCGACACAGGTGGTCAGGTAGAGAATACC |
| | AAGGCGCTTGAGAGAACTCGGGTGAAGGAACTAGGCAAAATGGTGCCG |
| | TAACTTCGGGAGAAGGCACGCTGATATGTAGGTGAGGTCCCTCGCGGA |
| | TGGAGCTGAAATCAGTCGAAGATACCAGCTGGCTGCAACTGTTTATTAA |
| | AAACACAGCACTGTGCAAACACGAAAGTGGACGTATACGGTGTGACGC |
| | CTGCCCGGTGCCGGAAGGTTAATTGATGGGGTTAGCGCAAGCGAAGCT |
| | CTTGATCGAAGCCCCGGTAAACGGCGGCCGTAACTATAACGGTCCTAA |
| | GGTAGCGAAATTCCTTGTCGGGTAAGTTCCGACCTGCACGAATGGCGTA |
| | ATGATGGCCAGGCTGTCTCCACCCGAGACTCAGTGAAATTGAACTCGCT |
| | GTGAAGATGCAGTGTACCCGCGGCAAGACGGTAAGACCCCGTGAACCT |
| | TTACTATAGCTTGACACTGAACATTGAGCCTTGATGTGTAGGATAGGTG |
| | GGAGGCTTTGAAGTGTGGACGCCAGTCTGCATGGAGCCGACCTTGAAA |
| | TACCACCCTTTAATGTTTGATGTTCTAACGTTGACCCGTAATCCGGGTTG |
| | CGGACAGTGTCTGGTGGGTAGTTTGACTGGGGCGGTCTCCTCCTAAAGA |
| | GTAACGGAGGAGCACGAAGGTTGGCTAATCCTGGTCGGACATCAGGAG |
| | GTTAGTGCAATGGCATAAGCCAGCTTGACTGCGAGCGTGACGGCGCGA |
| | GCAGGTGCGAAAGCAGGTCATAGTGATCCGGTGGTTCTGAATGGAAGG |
| | GCCATCGCTCAACGGATAAAAGGTACTCCGGGGATAACAGGCTGATAC |
| | CGCCCAAGAGTTCATATCGACGGCGGTGTTTGGCACCTCGATGTCGGCT |
| | CATCACATCCTGGGGCTGAAGTAGGTCCCAAGGGTATGGCTGTTCGCCA |
| | TTTAAAGTGGTACGCGAGCTGGGTTTAGAACGTCGTGAGACAGTTCGGT |
| | CCCTATCTGCCGTGGGCGCTGGAGAACTGAGGGGGGCTGCTCCTAGTAC |
| | GAGAGGACCGGAGTGGACGCATCACTGGTGTTCGGGTTGTCATGCCAA |
| | TGGCACTGCCCGGTAGCTAAATGCGGAAGAGATAAGTGCTGAAAGCAT |
| | CTAAGCACGAAACTTGCCCCGAGATGAGTTCTCCCTGACCCTTTAAGGG |
| | TCCTGAAGGAACGTTGAAGACGACGACGTTGATAGGCCGGGTGTGTAA |
| | GCGCAGCGATGCGTTGAGCTAACCGGTACTAATGAACCGTGAGGCTTA |
| | ACCTT (SEQ ID NO: 398) |
| rrlH | GGTTAAGCGACTAAGCGTACACGGTGGATGCCCTGGCAGTCAGAGGCG |
| A2058U | ATGAAGGACGTGCTAATCTGCGATAAGCGTCGGTAAGGTGATATGAAC |
| | CGTTATAACCGGCGATTTCCGAATGGGGAAACCCAGTGTGTTTCGACAC |
| | ACTATCATTAACTGAATCCATAGGTTAATGAGGCGAACCGGGGGAACT |
| | GAAACATCTAAGTACCCCGAGGAAAAGAAATCAACCGAGATTCCCCCA |
| | GTAGCGGCGAGCGAACGGGGAGGAGCCCAGAGCCTGAATCAGTGTGTG |
| | TGTTAGTGGAAGCGTCTGGAAAGGCGCGCGATACAGGGTGACAGCCCC |
| | GTACACAAAAATGCACATGCTGTGAGCTCGATGAGTAGGGCGGGACAC |
| | GTGGTATCCTGTCTGAATATGGGGGGACCATCCTCCAAGGCTAAATACT |
| | CCTGACTGACCGATAGTGAACCAGTACCGTGAGGGAAAGGCGAAAAGA |
| | ACCCCGGCGAGGGGAGTGAAAAAGAACCTGAAACCGTGTACGTACAAG |
| | CAGTGGGAGCATGCTTAGGCGTGTGACTGCGTACCTTTTGTATAATGGG |
| | TCAGCGACTTATATTCTGTAGCAAGGTTAACCGAATAGGGGAGCCGAA |
| | GGGAAACCGAGTCTTAACTGGGCGTTAAGTTGCAGGGTATAGACCCGA |
| | AACCCGGTGATCTAGCCATGGGCAGGTTGAAGGTTGGGTAACACTAAC |
| | TGGAGGACCGAACCGACTAATGTTGAAAAATTAGCGGATGACTTGTGG |
| | CTGGGGGTGAAAGGCCAATCAAACCGGGAGATAGCTGGTTCTCCCCGA |
| | AAGCTATTTAGGTAGCGCCTCGTGAACTCATCTCCGGGGGTAGAGCACT |
| | GTTTCGGCAAGGGGGTCATCCCGACTTACCAACCCGATGCAAACTGCGA |
| | ATACCGGAGAATGTTATCACGGGAGACACACGGCGGGTGCTAACGTCC |
| | GTCGTGAAGAGGGAAACAACCCAGACCGCCAGCTAAGGTCCCAAAGTC |
| | ATGGTTAAGTGGGAAACGATGTGGGAAGGCCCAGACAGCCAGGATGTT |
| | GGCTTAGAAGCAGCCATCATTTAAAGAAAGCGTAATAGCTCACTGGTC |
| | GAGTCGGCCTGCGCGGAAGATGTAACGGGGCTAAACCATGCACCGAAG |
| | CTGCGGCAGCGACGCTTATGCGTTGTTGGGTAGGGGAGCGTTCTGTAAG |
| | CCTGTGAAGGTGTACTGTGAGGTATGCTGGAGGTATCAGAAGTGCGAA |
| | TGCTGACATAAGTAACGATAAAGCGGGTGAAAAGCCCGCTCGCCGGAA |
| | GACCAAGGGTTCCTGTCCAACGTTAATCGGGGCAGGGTGAGTCGACCC |
| | CTAAGGCGAGGCCGAAAGGCGTAGTCGATGGGAAACAGGTTAATATTC |
| | CTGTACTTGGTGTTACTGCGAAGGGGGGACGGAGAAGGCTATGTTGGC |
| | CGGGCGACGGTTGTCCCGGTTTAAGCGTGTAGGCTGGTTTTCCAGGCAA |
| | ATCCGGAAAATCAAGGCTGAGGCGTGATGACGAGGCACTACGGTGCTG |
| | AAGCAACAAATGCCCTGCTTCCAGGAAAAGCCTCTAAGCATCAGGTAA |
| | CATCAAATCGTACCCCAAACCGACACAGGTGGTCAGGTAGAGAATACC |
| | AAGGCGCTTGAGAGAACTCGGGTGAAGGAACTAGGCAAAATGGTGCCG |
| | TAACTTCGGGAGAAGGCACGCTGATATGTAGGTGAAGCGACTTGCTCGT |
| | GGAGCTGAAATCAGTCGAAGATACCAGCTGGCTGCAACTGTTTATTAAA |
| | AACACAGCACTGTGCAAACACGAAAGTGGACGTATACGGTGTGACGCC |
| | TGCCCGGTGCCGGAAGGTTAATTGATGGGGTTAGCGCAAGCGAAGCTC |
| | TTGATCGAAGCCCCGGTAAACGGCGGCCGTAACTATAACGGTCCTAAG |
| | GTAGCGAAATTCCTTGTCGGGTAAGTTCCGACCTGCACGAATGGCGTAA |
| | TGATGGCCAGGCTGTCTCCACCCGAGACTCAGTGAAATTGAACTCGCTG |
| | TGAAGATGCAGTGTACCCGCGGCAAGACGGTAAGACCCCGTGAACCTT |
| | TACTATAGCTTGACACTGAACATTGAGCCTTGATGTGTAGGATAGGTGG |
| | GAGGCTTTGAAGTGTGGACGCCAGTCTGCATGGAGCCGACCTTGAAAT |
| | ACCACCCTTTAATGTTTGATGTTCTAACGTTGACCCGTAATCCGGGTTGC |
| | GGACAGTGTCTGGTGGGTAGTTTGACTGGGGCGGTCTCCTCCTAAAGAG |
| | TAACGGAGGAGCACGAAGGTTGGCTAATCCTGGTCGGACATCAGGAGG |
| | TTAGTGCAATGGCATAAGCCAGCTTGACTGCGAGCGTGACGGCGCGAG |
| | CAGGTGCGAAAGCAGGTCATAGTGATCCGGTGGTTCTGAATGGAAGGG |
| | CCATCGCTCAACGGATAAAAGGTACTCCGGGGATAACAGGCTGATACC |
| | GCCCAAGAGTTCATATCGACGGCGGTGTTTGGCACCTCGATGTCGGCTC |
| | ATCACATCCTGGGGCTGAAGTAGGTCCCAAGGGTATGGCTGTTCGCCAT |
| | TTAAAGTGGTACGCGAGCTGGGTTTAGAACGTCGTGAGACAGTTCGGTC |
| | CCTATCTGCCGTGGGCGCTGGAGAACTGAGGGGGGCTGCTCCTAGTACG |
| | AGAGGACCGGAGTGGACGCATCACTGGTGTTCGGGTTGTCATGCCAAT |
| | GGCACTGCCCGGTAGCTAAATGCGGAAGAGATAAGTGCTGAAAGCATC |
| | TAAGCACGAAACTTGCCCCGAGATGAGTTCTCCCTGACTCCTTGAGAGT |
| | CCTGAAGGAACGTTGAAGACGACGACGTTGATAGGCCGGGTGTGTAAG |
| | CGCAGCGATGCGTTGAGCTAACCGGTACTAATGAACCGTGAGGCTTAA |
| | CCTT (SEQ ID NO: 400) |

[0179] Next, the ErmC leader peptide, ermCL, was introduced ahead of the orthogonal sfGFP reporter, ensuring that reporter translation would be abrogated via erythromycin- and ermCL-dependent translational stalling (78) (FIG. 18B).

[0180] Reporter plasmid pAB140j8 was specifically employed, having the following nucleic acid sequence:

(SEQ ID NO: 384)
TTGAGACACAACGTGGCTTTCCATCAAAAAAATATTGACAACATAAAAAA
CTTTGTGTTATACTTGTGGAATTGTGAGCGGATAACAATTCTATATCTGT
TATTTTTTCCAACCACAGATCTATGGGCATTTTTAGTATTTTTGTAATCA
GCACAGTTCATTATCAACCAAACAAAAAATTAAGTGGTTATAATGAATCG
TTAATAAGCAAAATTCATTATAACCAAATTAGCAAAGGTGAAGAACTGTT
TACCGGCGTTGTGCCGATTCTGGTGGAACTGGATGGCGATGTGAACGGTC
ACAAATTCAGCGTGCGTGGTGAAGGTGAAGGCGATGCCACGATTGGCAAA
CTGACGCTGAAATTTATCTGCACCACCGGCAAACTGCCGGTGCCGTGGCC
GACGCTGGTGACCACCCTGACCTATGGCGTTCAGTGTTTTAGTCGCTATC
CGGATCACATGAAACGTCACGATTTCTTTAAATCTGCAATGCCGGAAGGC
TATGTGCAGGAACGTACGATTAGCTTTAAAGATGATGGCAAATATAAAAC
GCGCGCCGTTGTGAAATTTGAAGGCGATACCCTGGTGAACCGCATTGAAC
TGAAAGGCACGGATTTTAAAGAAGATGGCAATATCCTGGGCCATAAACTG
GAATACAACTTTAATAGCCATAATGTTTATATTACGGCGGATAAACAGAA
AAATGGCATCAAAGCGAATTTTACCGTTCGCCATAACGTTGAAGATGGCA
GTGTGCAGCTGGCAGATCATTATCAGCAGAATACCCCGATTGGTGATGGT
CCGGTGCTGCTGCCGGATAATCATTATCTGAGCACGCAGACCGTTCTGTC
TAAAGATCCGAACGAAAAAGGCACGCGGGACCACATGGTTCTGCACGAAT
ATGTGAATGCGGCAGGTATTATGTGGAGCCATCCGCAGTTCGAAAAATAA
GTCGACCGGCTGCTAACAAAGCCCGCGGCCGCTGAAGATCGATCTCGACG
AGTGAGAGAAGATTTTCAGCCTGATACAGATTAAATCAGAACGCAGAAGC
GGTCTGATAAAACAGAATTTGCCTGGCGGCAGTAGCGCGGTGGTCCCACC
TGACCCCATGCCGAACTCAGAAGTGAAACGCCGTAGCGCCGATGGTAGTG
TGGGGTCACCCCATGCGAGAGTAGGGAACTGCCAGGCATCAAATAAAACG
AAAGGCTCAGTCGAAAGACTGGGCCTTTCGTTTTATCTGTTGTTTGTCGG
TGAACGCTCTCCTGAGTAGGACAAATCCGCCGGGAGCGGATTTGAACGTT
GCGAAGCAACGGCCCGGAGGGTGGCGGGCAGGACGCCCGCCATAAACTGC
CAGGCATCAAATTAAGCAGAAGGCCATCCTGACGGATGGCCTTTTTGCGT
TTCTACAGAGCGTCAGACCCCTTAATAAGATGATCTTCTTGAGATCGTTT
TGGTCTGCGCGTAATCTCTTGCTCTGAAAACGAAAAAACCGCCTTGCAGG
GCGGTTTTTCGAAGGTTCTCTGAGCTACCAACTCTTTGAACCGAGGTAAC
TGGCTTGGAGGAGCGCAGTCACCAAAACTTGTCCTTTCAGTTTAGCCTTA
ACCGGCGCATGACTTCAAGACTAACTCCTCTAAATCAATTACCAGTGGCT
GCTGCCAGTGGTGCTTTTGCATGTCTTTCCGGGTTGGACTCAAGACGATA
GTTACCGGATAAGGCGCAGCGGTCGGACTGAACGGGGGGTTCGTGCATAC
AGTCCAGCTTGGAGCGAACTGCCTACCCGGAACTGAGTGTCAGGCGTGGA
ATGAGACAAACGCGGCCATAACAGCGGAATGACACCGGTAAACCGAAAGG
CAGGAACAGGAGAGCGCACGAGGGAGCCGCCAGGGGGAAACGCCTGGTAT
CTTTATAGTCCTGTCGGGTTTCGCCACCACTGATTTGAGCGTCAGATTTC
GTGATGCTTGTCAGGGGGGCGGAGCCTATGGAAAAACGGCTCAAGTCAGC
GTAATGCTCTGCCAGTGTTACAACCAATTAACCAATTCTGATTAGAAAAA
CTCATCGAGCATCAAATGAAACTGCAATTTATTCATATCAGGATTATCAA
TACCATATTTTTGAAAAAGCCGTTTCTGTAATGAAGGAGAAAACTCACCG
AGGCAGTTCCATAGGATGGCAAGATCCTGGTATCGGTCTGCGATTCCGAC
TCGTCCAACATCAATACAACCTATTAATTTCCCCTCGTCAAAAATAAGGT
TATCAAGTGAGAAATCACCATGAGTGACGACTGAATCCGGTGAGAATGGC
AAAAGCTTATGCATTTCTTTCCAGACTTGTTCAACAGGCCAGCCATTACG
CTCGTCATCAAAATCACTCGCATCAACCAAACCGTTATTCATTCGTGATT
GCGCCTGAGCGAGACGAAATACGCGATCGCTGTTAAAAGGACAATTACAA
ACAGGAATCGAATGCAACCGGCGCAGGAACACTGCCAGCGCATCAACAAT
ATTTTCACCTGAATCAGGATATTCTTCTAATACCTGGAATGCTGTTTTCC
CGGGGATCGCAGTGGTGAGTAACCATGCATCATCAGGAGTACGGATAAAA
TGCTTGATGGTCGGAAGAGGCATAAATTCCGTCAGCCAGTTTAGTCTGAC
CATCTCATCTGTAACATCATTGGCAACGCTACCTTTGCCATGTTTCAGAA
ACAACTCTGGCGCATCGGGCTTCCCATACAATCGATAGATTGTCGCACCT
GATTGCCCGACATTATCGCGAGCCCATTTATACCCATATAAATCAGCATC
CATGTTGGAATTTAATCGCGGCCTCGAGCAAGACGTTTCCCGTTGAATAT
GGCTCATAACACCCCTTGTATTACTGTTTATGTAAGCAGACAGTTTTATT
GTTCATGATGATATATTTTTATCTTGTGCAATGTAACATCAGAGATT

[0181] To validate this sensor, the erythromycin sensitivity of an episome-derived E. coli orthogonal ribosome encoding or lacking the identical A2058U mutation was assessed. A recently described stapled E. coli ribosome (d2d8) (7) that preferentially uses a covalently linked 23S rRNA, with or without the identical mutation was used as a control. Using this sensor/strain combination, it was observed that A2058U-LSUs showed no appreciable change in orthogonal translation upon erythromycin dosing (FIG. 18C). Conversely, unmutated LSUs showed a marked reduction in orthogonal translation in an erythromycin dose-dependent manner. Unstapled E. coli LSUs lacking the A2058U mutation re-sensitized S4246 cells to erythromycin, whereas the stapled counterpart did not (FIG. 18D), which indicated that plasmid-encoded LSUs co-assembled with genome-encoded SSUs and generated erythromycin-sensitive ribosomes incapable of translating essential E. coli genes (FIG. 20A).

[0182] This analysis was next extended to a set of 20 functional heterologous ribosomes. For heterologous ribosomes with high 16S sequence identity to E. coli (≥99.2%), a dramatic reduction in both sfGFP translation and cell viability was observed (FIGS. 18E, 20B and 21), demonstrating appreciable exchange between host and heterologous ribosomes. Notably, heterologous ribosomes bearing intermediate homology (92.9-97.0%) showed extensive reduction in sfGFP signal upon erythromycin treatment with no associated viability defect. These reductions in sfGFP signal were comparable to or greater than the corresponding effect on the d2d8 stapled E. coli ribosome, indicating a similar degree of association between cognate subunits. However, for more divergent heterologous ribosomes (79.3-90.3%), sfGFP signal decreased minimally upon erythromycin treatment, indicating that additional rRNA operon modifications or complementation with cognate factors is necessary to enable the preferential usage of the heterologous LSU.

[0183] To reduce association between heterologous and E. coli ribosomal subunits, the above rRNA stapling approach (7) was extended to the same 20 heterologous ribosomes, wherein the staple was extensible to rRNAs with high sequence identity (>99.2% 16S) to E. coli (FIGS. 20C to 20E). However, for most rRNAs, this approach did not increase erythromycin sensitivity. Therefore, it was concluded that the d2d8 linkers were not suitable for heterologous LSUs, and “hybrid” ribosomes were generated comprising heterologous SSUs stapled to E. coli LSUs. These hybrid ribosomes varied considerably in erythromycin sensitivity, which indicated that implemented rRNA linkers required independent optimization for each heterologous ribosome. Collectively, these data demonstrated that intermediately divergent heterologous SSUs preferentially associated with cognate LSUs in E. coli.

[0184] Thus, a library of 34 heterologous ribosomes derived from species across a broad phylogenetic range has been constructed herein and expressed in E. coli. The functionality of each of these ribosomes has been evaluated using both Δ7 strain complementation and orthogonal translation, with a high degree of correlation observed between the two assays. Remarkably, replacement of intergenic sequences with those of E. coli, as well as supplementation with only a small subset of r-proteins (S20, S16, S1, S15), significantly improved expression from orthogonal heterologous rRNAs. While o-rRNAs with high sequence identity (up to 96.2% 16S rRNA sequence identity to E. coli) natively translated superfolder GFP (sfGFP) at robust levels, substitution of intergenic sequences allowed for o-rRNAs as divergent as P. mirabilis (92.9%) to translate the orthogonal transcript at levels similar to the E. coli o-rRNA. Supplementation with r-proteins S20 and S16 allowed for similarly robust levels of translation from o-rRNA derived from A. baumannii (84.3%). More remarkably, using a more extensive set of r-proteins, heterologous translation from o-rRNAs as diverged as E. faecalis (76.1%) was achieved in the instant E. coli system. Further, an erythromycin-dependent reporter system was developed, which demonstrated that a subset of heterologous SSUs preferentially associated with their cognate LSUs.

[0185] Collectively, the instant disclosure has established orthogonal translation as a viable alternative to Δ7 complementation for evaluating the function of heterologous rRNAs and has provided generalizable strategies for enhancing heterologous rRNA function. Notably, of the four r-proteins found to be broadly important for o-rRNA function, only two (S1 and S16) have been found to be essential for viability in E. coli via gene knockout (45, 46), which indicates that essentiality cannot serve as a predictor of crucial factors enhancing o-rRNA function. It was therefore sought herein to determine whether rules for predicting r-proteins necessary for complementing heterologous o-rRNAs could be derived. Using sequence similarities of heterologous SSU r-proteins to their E. coli homologues, it was discovered that r-proteins empirically found to be crucial for complementation (S20, S16, and S15) tended to be those with the lowest sequence similarity (FIGS. 13A-13N). All three aforementioned proteins regulate the earliest stages of 30S assembly (79). In the case of S20 and S16, low sequence similarity is likely due to their roles as primary binders to the rRNA (44, 45, 79). In the case of S1, it often interacts with mRNAs in proximity to the RBS during translational initiation (80, 81), indicating that it mediates correct RBS/antiRBS interactions using noncanonical (orthogonal) pairs. An approach based on sequence divergence is therefore provided as a guide for predicting r-proteins necessary for complementation of heterologous rRNAs.

[0186] It is therefore contemplated herein that heterologous rRNAs—specifically those of relevance to human health—can be expressed in E. coli for the high-throughput discovery of ribosome-targeting antibiotics. In particular, in certain embodiments, screening can be performed in the heterologous rRNA and/or r-protein systems that are disclosed herein, to identify antibiotics that are selective to ribosomes of pathogens, while doing less or no damage to ribosomes of commensal micro-organisms. Optionally, such screening assays can be multiplexed, thereby allowing for direct comparisons to be made between ribosomes of pathogenic microbes and ribosomes of non-pathogenic microbes (e.g., ribosomes of commensal microbes). More broadly, the strategies described herein can be used in the development of increasingly divergent ribosomes that limit interaction with host cells, yielding more orthogonal components for engineered variations of the central dogma. Finally, the heterologous ribosomes described infra are contemplated to serve as alternative starting points for the discovery and evolution of novel translational properties. Through the use of such diverse ribosomes, synthetic biologists can now take advantage of and likely repurpose the myriad functionalities for which bacteria have evolved their ribosomes.

[0187] Expressly contemplated applications of the compositions and methods of the instant disclosure therefore include, without limitation, the following:

[0188] (1) Scalable, and potentially multiplexed, discovery of molecules that selectively inhibit ribosomes of pathogenic bacteria, optionally in direct comparison to ribosomes of commensal bacteria: In an exemplary application, an orthogonal, heterologous ribosome is measured via a single reporter in E. coli. Combinations of pathogenic ribosomes and reporters are mixed in 96-well plate format. Combinations of commensal ribosomes and reporters are also optionally mixed in the same or parallel 96-well plate format. Test compound is added to each well. Relative decrease of reporter activity in a single well is considered a “hit” (putative specific inhibitor of bacterial translation), where a molecule that hits pathogenic ribosomes while having fewer or no hits to commensal ribosomes is considered a pathogen-selective “hit” as compared to commensal strains. Such a platform obviates inefficiencies traditionally associated with antimicrobial small-molecule screens (i.e., variable bacterial growth conditions, biohazard concerns).

[0189] (2) Prediction of resistance alleles (optionally to newly discovered small molecules): predicted resistance alleles can be introduced via PCR onto the rRNA of a heterologous ribosome. As for (1) above, test compounds can be screened against mutated ribosomes.

[0190] (3) Engineered heterologous ribosomes for enhanced bioproduction capabilities: heterologous ribosomes putatively share fewer resources with the E. coli host cell than native ribosomes. Heterologous orthogonal ribosomes may be directed towards the production of biomolecules for industry or pharmaceuticals.

[0191] Certain aspects of the instant disclosure contemplate use of the exemplary sequences presented in Tables 2-4 below.

Exemplified E. coli Intergenic Sequences

| Name | Sequence |
|---|---|
| Pre-16S | 5′-ACTGCTCTTTAACAATTTATCAGACAATCTGTGTG |
| | GGCACTCGAAGATACGGATTCTTAACGTCGCAAGACGA |
| | AAAATGAATACCAAGTCTCAAGAGTGAACACGTAATTC |
| | ATTACGAAGTTTAATTCTTTGAGCGTCAAACTTTT-3′ |
| | (SEQ ID NO: 410) |
| 16Sto 23S | 5′-CCTTAAAGAAGCGTACTTTGTAGTGCTCACACAGA |
| | TTGTCTGATAGAAAGTGAAAAGCAAGGCGTTTACGCGT |
| | TGGGAGTGAGGCTGAAGAGAATAAGGCCGTTCGCTTTC |
| | TATTAATGAAAGCTCACCCTACACGAAAATATCACGCA |
| | ACGCGTGATAAGCAATTTTCGTGTCCCCTTCGTCTAGA |
| | GGCCCAGGACACCGCCCTTTCACGGCGGTAACAGGGGT |
| | TCGAATCCCCTAGGGGACGCCACTTGCTGGTTTGTGAG |
| | TGAAAGTCGCCGACCTTAATATCTCAAAACTCATCTTC |
| | GGGTGATGTTTGAGATATTTGCTCTTTAAAAATCTGGA |
| | TCAAGCTGAAAATTGAAACACTGAACAACGAGAGTTGT |
| | TCGTGAGTCTCTCAAATTTTCGCAACACGATGATGAAT |
| | CGAAAGAAACATCTTCGGGTTGTGA-3′ |
| | (SEQ ID NO: 411) |
| 235 to 5S | 5′-ACAACGCCGAAGCTGTTTTGGCGGATGAGAGAAGA |
| | TTTTCAGCCTGATACAGATTAAATCAGAACGCAGAAGC |
| | GGTCTGATAAAACAGAATT-3′ |
| | (SEQ ID NO: 412) |
| Post-5S | 5′-CAAATAAAACGAAAGGCTCAGTCGAAAGACTGGGC |
| | CTTTCGTTTTATCTGTTGTTTGTCGGTGAACGCTCTCC |
| | TGAGTAGGACAAATCCGCCGGGAGCGGATTTGAACGTT |
| | GCGAAGCAACGGCCCGGAGGGTGGCGGGCAGGACGCCC |
| | GCCATAAACTGCCAGGCATCAAATTAAGCAGAAGGCCA |
| | TCCTGACGGATGGCCTTTTTGCGTTTCTACAAACTCTT |
| | CCTGTCGTCATATCTACAAGCC-3′ |
| | (SEQ ID NO: 413) |

TABLE 3
Exemplified and Expressly Contemplated 16S, 23Sand SSrRNA Coding Sequences

| Name | Sequence |
|---|---|
| A. baumannn 16S | 5′-TAACTGAAGAGTTTGATCATGGCTCAGATTGAACGCTGGCGGCAGGCTTAACACATGCAA |
| (contains O-antiRBS) | GTCGAGCGGGGGAAGGTAGCTTGCTACCGGACCTAGCGGCGGACGGGTGAGTAATGCTTAGGA |
| | ATCTGCCTATTAGTGGGGGACAACATCTCGAAAGGGATGCTAATACCGCATACGTCCTACGGG |
| | AGAAAGCAGGGGATCTTCGGACCTTGCGCTAATAGATGAGCCTAAGTCGGATTAGCTAGTTGG |
| | TGGGGTAAAGGCCTACCAAGGCGACGATCTGTAGCGGGTCTGAGAGGATGATCCGCCACACTG |
| | GGACTGAGACACGGCCCAGACTCCTACGGGAGGCAGCAGTGGGGAATATTGGACAATGGGCGC |
| | AAGCCTGATCCAGCCATGCCGCGTGTGTGAAGAAGGCCTTATGGTTGTAAAGCACTTTAAGCG |
| | AGGAGGAGGCTACTTTAGATAATACCTAGAGATAGTGGACGTTACTCGCAGAATAAGCACCGG |
| | CTAACTCTGTGCCAGCAGCCGCGGTAATACAGAGGGTGCAAGCGTTAATCGGATTTACTGGGC |
| | GTAAAGCGCGCGTAGGCGGCTAATTAAGTCAAATGTGAAATCCCCGAGCTTAACTTGGGAATT |
| | GCATTCGATACTGGTTAGCTAGAGTGTGGGAGAGGATGGTAGAATTCCAGGTGTAGCGGTGAA |
| | ATGCGTAGAGATCTGGAGGAATACCGATGGCGAAGGCAGCCATCTGGCCTAACACTGACGCTG |
| | AGGTGCGAAAGCATGGGGAGCAAACAGGATTAGATACCCTGGTAGTCCATGCCGTAAACGATG |
| | TCTACTAGCCGTTGGGGCCTTTGAGGCTTTAGTGGCGCAGCTAACGCGATAAGTAGACCGCCT |
| | GGGGAGTACGGTCGCAAGACTAAAACTCAAATGAATTGACGGGGGCCCGCACAAGCGGTGGAG |
| | CATGTGGTTTAATTCGATGCAACGCGAAGAACCTTACCTGGCCTTGACATAGTAAGAACTTTC |
| | CAGAGATGGATTGGTGCCTTCGGGAACTTACATACAGGTGCTGCATGGCTGTCGTCAGCTCGT |
| | GTCGTGAGATGTTGGGTTAAGTCCCGCAACGAGCGCAACCCTTTTCCTTATTTGCCAGCGAGT |
| | AATGTCGGGAACTTTAAGGATACTGCCAGTGACAAACTGGAGGAAGGCGGGGACGACGTCAAG |
| | TCATCATGGCCCTTACGGCCAGGGCTACACACGTGCTACAATGGTCGGTACAAAGGGTTGCTA |
| | CACAGCGATGTGATGCTAATCTCAAAAAGCCGATCGTAGTCCGGATTGGAGTCTGCAACTCGA |
| | CTCCATGAAGTCGGAATCGCTAGTAATCGCGGATCAGAATGCCGCGGTGAATACGTTCCCGGG |
| | CCTTGTACACACCGCCCGTCACACCATGGGAGTTTGTTGCACCAGAAGTAGCTAGCCTAACTG |
| | CAAAGAGGGCGGTTACCACGGTGTGGCCGATGACTGGGGTGAAGTCGTAACAAGGTAGCCGTA |
| | GGGGAACCTGCGGCTGGATCATGTGGTAT-3′ (SEQ ID NO: 414) |
| V. cholerae 16S | 5′-TAATTGAAGAGTTTGATCATGGCTCAGATTGAACGCTGGCGGCAGGCCTAACACATGCAA |
| (contains O-antiRBS) | GTCGAGCGGCAGCACAGAGGAACTTGTTCCTTGGGTGGCGAGCGGCGGACGGGTGAGTAATGC |
| | CTGGGAAATTGCCCGGTAGAGGGGGATAACCATTGGAAACGATGGCTAATACCGCATAACCTC |
| | GCAAGAGCAAAGCAGGGGACCTTCGGGCCTTGCGCTACCGGATATGCCCAGGTGGGATTAGCT |
| | AGTTGGTGAGGTAAGGGCTCACCAAGGCGACGATCCCTAGCTGGTCTGAGAGGATGATCAGCC |
| | ACACTGGAACTGAGACACGGTCCAGACTCCTACGGGAGGCAGCAGTGGGGAATATTGCACAAT |
| | GGGCGCAAGCCTGATGCAGCCATGCCGCGTGTATGAAGAAGGCCTTCGGGTTGTAAAGTACTT |
| | TCAGTAGGGAGGAAGGTGGTTAAGTTAATACCTTAATCATTTGACGTTACCTACAGAAGAAGC |
| | ACCGGCTAACTCCGTGCCAGCAGCCGCGGTAATACGGAGGGTGCAAGCGTTAATCGGAATTAC |
| | TGGGCGTAAAGCGCATGCAGGTGGTTTGTTAAGTCAGATGTGAAAGCCCTGGGCTCAACCTAG |
| | GAATCGCATTTGAAACTGACAAGCTAGAGTACTGTAGAGGGGGGTAGAATTTCAGGTGTAGCG |
| | GTGAAATGCGTAGAGATCTGAAGGAATACCGGTGGCGAAGGCGGCCCCCTGGACAGATACTGA |
| | CACTCAGATGCGAAAGCGTGGGGAGCAAACAGGATTAGATACCCTGGTAGTCCACGCCGTAAA |
| | CGATGTCTACTTGGAGGTTGTGACCTAGAGTCGTGGCTTTCGGAGCTAACGCGTTAAGTAGAC |
| | CGCCTGGGGAGTACGGTCGCAAGATTAAAACTCAAATGAATTGACGGGGGCCCGCACAAGCGG |
| | TGGAGCATGTGGTTTAATTCGATGCAACGCGAAGAACCTTACCTACTCTTGACATCCAGAGAA |
| | TCTAGCGGAGACGCTGGAGTGCCTTCGGGAGCTCTGAGACAGGTGCTGCATGGCTGTCGTCAG |
| | CTCGTGTTGTGAAATGTTGGGTTAAGTCCCGCAACGAGCGCAACCCTTATCCTTGTTTGCCAG |
| | CACGTAATGGTGGGAACTCCAGGGAGACTGCCGGTGATAAACCGGAGGAAGGTGGGGACGACG |
| | TCAAGTCATCATGGCCCTTACGAGTAGGGCTACACACGTGCTACAATGGCGTATACAGAGGGC |
| | AGCGATACCGCGAGGTGGAGCGAATCTCACAAAGTACGTCGTAGTCCGGATTGGAGTCTGCAA |
| | CTCGACTCCATGAAGTCGGAATCGCTAGTAATCGCAAATCAGAATGTTGCGGTGAATACGTTC |
| | CCGGGCCTTGTACACACCGCCCGTCACACCATGGGAGTGGGCTGCAAAAGAAGCAGGTAGTTT |
| | AACCTTCGGGAGGACGCTTGCCACTTTGTGGTTCATGACTGGGGTGAAGTCGTAACAAGGTAG |
| | CGCTAGGGGAACCTGGCGCTGGATCATGTGGTTA-3′ (SEQ ID NO: 415) |
| P. aeruginosa 16S | 5′-GAACTGAAGAGTTTGATCATGGCTCAGATTGAACGCTGGCGGCAGGCCTAACACATGCAA |
| (contains O-antiRBS) | GTCGAGCGGATGAAGGGAGCTTGCTCCTGGATTCAGCGGCGGACGGGTGAGTAATGCCTAGGA |
| | ATCTGCCTGGTAGTGGGGGATAACGTCCGGAAACGGGCGCTAATACCGCATACGTCCTGAGGG |
| | AGAAAGTGGGGGATCTTCGGACCTCACGCTATCAGATGAGCCTAGGTCGGATTAGCTAGTTGG |
| | TGGGGTAAAGGCCTACCAAGGCGACGATCCGTAACTGGTCTGAGAGGATGATCAGTCACACTG |
| | GAACTGAGACACGGTCCAGACTCCTACGGGAGGCAGCAGTGGGGAATATTGGACAATGGGCGA |
| | AAGCCTGATCCAGCCATGCCGCGTGTGTGAAGAAGGTCTTCGGATTGTAAAGCACTTTAAGTT |
| | GGGAGGAAGGGCAGTAAGTTAATACCTTGCTGTTTTGACGTTACCAACAGAATAAGCACCGGC |
| | TAACTTCGTGCCAGCAGCCGCGGTAATACGAAGGGTGCAAGCGTTAATCGGAATTACTGGGCG |
| | TAAAGCGCGCGTAGGTGGTTCAGCAAGTTGGATGTGAAATCCCCGGGCTCAACCTGGGAACTG |
| | CATCCAAAACTACTGAGCTAGAGTACGGTAGAGGGTGGTGGAATTTCCTGTGTAGCGGTGAAA |
| | TGCGTAGATATAGGAAGGAACACCAGTGGCGAAGGCGACCACCTGGACTGATACTGACACTGA |
| | GGTGCGAAAGCGTGGGGAGCAAACAGGATTAGATACCCTGGTAGTCCACGCCGTAAACGATGT |
| | CGACTAGCCGTTGGGATCCTTGAGATCTTAGTGGCGCAGCTAACGCGATAAGTCGACCGCCTG |
| | GGGAGTACGGCCGCAAGGTTAAAACTCAAATGAATTGACGGGGGCCCGCACAAGCGGTGGAGC |
| | ATGTGGTTTAATTCGAAGCAACGCGAAGAACCTTACCTGGCCTTGACATGCTGAGAACTTTCC |
| | AGAGATGGATTGGTGCCTTCGGGAACTCAGACACAGGTGCTGCATGGCTGTCGTCAGCTCGTG |
| | TCGTGAGATGTTGGGTTAAGTCCCGTAACGAGCGCAACCCTTGTCCTTAGTTACCAGCACCTC |
| | GGGTGGGCACTCTAAGGAGACTGCCGGTGACAAACCGGAGGAAGGTGGGGATGACGTCAAGTC |
| | ATCATGGCCCTTACGGCCAGGGCTACACACGTGCTACAATGGTCGGTACAAAGGGTTGCCAAG |
| | CCGCGAGGTGGAGCTAATCCCATAAAACCGATCGTAGTCCGGATCGCAGTCTGCAACTCGACT |
| | GCGTGAAGTCGGAATCGCTAGTAATCGTGAATCAGAATGTCACGGTGAATACGTTCCCGGGCC |
| | TTGTACACACCGCCCGTCACACCATGGGAGTGGGTTGCTCCAGAAGTAGCTAGTCTAACCGCA |
| | AGGGGGACGGTTACCACGGAGTGATTCATGACTGGGGTGAAGTCGTAACAAGGTAGCCGTAGG |
| | GGAACCTGCGGCTGGATCATGTGGTTA-3′ (SEQ ID NO: 416) |
| S. marcescens 16S | 5′-TAATTGAAGAGTTTGATCATGGCTCAGATTGAACGCTGGCGGCAGGCTTAACACATGCAA |
| (contains O-antiRBS) | GTCGAGCGGTAGCACAGGGGAGCTTGCTCCCTGGGTGACGAGCGGCGGACGGGTGAGTAATGT |
| | CTGGGAAACTGCCTGATGGAGGGGGATAACTACTGGAAACGGTAGCTAATACCGCATAACGTC |
| | GCAAGACCAAAGAGGGGGACCTTCGGGCCTCTTGCCATCAGATGTGCCCAGATGGGATTAGCT |
| | AGTAGGTGGGGTAATGGCTCACCTAGGCGACGATCCCTAGCTGGTCTGAGAGGATGACCAGCC |
| | ACACTGGAACTGAGACACGGTCCAGACTCCTACGGGAGGCAGCAGTGGGGAATATTGCACAAT |
| | GGGCGCAAGCCTGATGCAGCCATGCCGCGTGTGTGAAGAAGGCCTTCGGGTTGTAAAGCACTT |
| | TCAGCGAGGAGGAAGGTGGTGAGCTTAATACGCTCATCAATTGACGTTACTCGCAGAAGAAGC |
| | ACCGGCTAACTCCGTGCCAGCAGCCGCGGTAATACGGAGGGTGCAAGCGTTAATCGGAATTAC |
| | TGGGCGTAAAGCGCACGCAGGCGGTTTGTTAAGTCAGATGTGAAATCCCCGGGCTCAACCTGG |
| | GAACTGCATTTGAAACTGGCAAGCTAGAGTCTCGTAGAGGGGGGTAGAATTCCAGGTGTAGCG |
| | GTGAAATGCGTAGAGATCTGGAGGAATACCGGTGGCGAAGGCGGCCCCCTGGACGAAGACTGA |
| | CGCTCAGGTGCGAAAGCGTGGGGAGCAAACAGGATTAGATACCCTGGTAGTCCACGCTGTAAA |
| | CGATGTCGATTTGGAGGTTGTGCCCTTGAGGCGTGGCTTCCGGAGCTAACGCGTTAAATCGAC |
| | CGCCTGGGGAGTACGGCCGCAAGGTTAAAACTCAAATGAATTGACGGGGGCCCGCACAAGCGG |
| | TGGAGCATGTGGTTTAATTCGATGCAACGCGAAGAACCTTACCTACTCTTGACATCCAGAGAA |
| | CTTAGCAGAGATGCTTTGGTGCCTTCGGGAACTCTGAGACAGGTGCTGCATGGCTGTCGTCAG |
| | CTCGTGTTGTGAAATGTTGGGTTAAGTCCCGCAACGAGCGCAACCCTTATCCTTTGTTGCCAG |
| | CGGTTCGGCCGGGAACTCAAAGGAGACTGCCAGTGATAAACTGGAGGAAGGTGGGGATGACGT |
| | CAAGTCATCATGGCCCTTACGAGTAGGGCTACACACGTGCTACAATGGCATATACAAAGAGAA |
| | GCGACCTCGCGAGAGCAAGCGGACCTCATAAAGTATGTCGTAGTCCGGATTGGAGTCTGCAAC |
| | TCGACTCCATGAAGTCGGAATCGCTAGTAATCGTAGATCAGAATGCTACGGTGAATACGTTCC |
| | CGGGCCTTGTACACACCGCCCGTCACACCATGGGAGTGGGTTGCAAAAGAAGTAGGTAGCTTA |
| | ACCTTCGGGAGGGCGCTTACCACTTTGTGATTCATGACTGGGGTGAAGTCGTAACAAGGTAAC |
| | CGTAGGGGAACCTGCGGTTGGATCATGTGGTTA-3′ (SEQ ID NO: 417) |
| S. enterica 16S | 5′-AAATTGAAGAGTTTGATCATGGCTCAGATTGAACGCTGGCGGCAGGCCTAACACATGCAA |
| (contains O-antiRBS) | GTCGAACGGTAACAGGAAGCAGCTTGCTGCTTCGCTGACGAGTGGCGGACGGGTGAGTAATGT |
| | CTGGGAAACTGCCTGATGGAGGGGGATAACTACTGGAAACGGTGGCTAATACCGCATAACGTC |
| | GCAAGACCAAAGAGGGGGACCTTCGGGCCTCTTGCCATCAGATGTGCCCAGATGGGATTAGCT |
| | AGTTGGTGAGGTAACGGCTCACCAAGGCGACGATCCCTAGCTGGTCTGAGAGGATGACCAGCC |
| | ACACTGGAACTGAGACACGGTCCAGACTCCTACGGGAGGCAGCAGTGGGGAATATTGCACAAT |
| | GGGCGCAAGCCTGATGCAGCCATGCCGCGTGTATGAAGAAGGCCTTCGGGTTGTAAAGTACTT |
| | TCAGCGGGGAGGAAGGTGTTGTGGTTAATAACCGCAGCAATTGACGTTACCCGCAGAAGAAGC |
| | ACCGGCTAACTCCGTGCCAGCAGCCGCGGTAATACGGAGGGTGCAAGCGTTAATCGGAATTAC |
| | TGGGCGTAAAGCGCACGCAGGCGGTCTGTCAAGTCGGATGTGAAATCCCCGGGCTCAACCTGG |
| | GAACTGCATTCGAAACTGGCAGGCTTGAGTCTTGTAGAGGGGGGTAGAATTCCAGGTGTAGCG |
| | GTGAAATGCGTAGAGATCTGGAGGAATACCGGTGGCGAAGGCGGCCCCCTGGACAAAGACTGA |
| | CGCTCAGGTGCGAAAGCGTGGGGAGCAAACAGGATTAGATACCCTGGTAGTCCACGCCGTAAA |
| | CGATGTCTACTTGGAGGTTGTGCCCTTGAGGCGTGGCTTCCGGAGCTAACGCGTTAAGTAGAC |
| | CGCCTGGGGAGTACGGCCGCAAGGTTAAAACTCAAATGAATTGACGGGGGCCCGCACAAGCGG |
| | TGGAGCATGTGGTTTAATTCGATGCAACGCGAAGAACCTTACCTGGTCTTGACATCCACAGAA |
| | CTTTCCAGAGATGGATTGGTGCCTTCGGGAACTGTGAGACAGGTGCTGCATGGCTGTCGTCAG |
| | CTCGTGTTGTGAAATGTTGGGTTAAGTCCCGCAACGAGCGCAACCCTTATCCTTTGTTGCCAG |
| | CGATTAGGTCGGGAACTCAAAGGAGACTGCCAGTGATAAACTGGAGGAAGGTGGGGATGACGT |
| | CAAGTCATCATGGCCCTTACGACCAGGGCTACACACGTGCTACAATGGCGCATACAAAGAGAA |
| | GCGACCTCGCGAGAGCAAGCGGACCTCATAAAGTGCGTCGTAGTCCGGATTGGAGTCTGCAAC |
| | TCGACTCCATGAAGTCGGAATCGCTAGTAATCGTGGATCAGAATGCCACGGTGAATACGTTCC |
| | CGGGCCTTGTACACACCGCCCGTCACACCATGGGAGTGGGTTGCAAAAGAAGTAGGTAGCTTA |
| | ACCTTCGGGAGGGCGCTTACCACTTTGTGATTCATGACTGGGGTGAAGTCGTAACAAGGTAAC |
| | CGTAGGGGAACCTGCGGTTGGATCATGTGGTTA-3′ (SEQ ID NO: 418) |
| N. gonohhhoeae 16S | 5′-GAACATAAGAGTTTGATCCTGGCTCAGATTGAACGCTGGCGGCATGCTTTACACATGCAA |
| (contains O-antiRBS) | GTCGGACGGCAGCACAGGGAAGCTTGCTTCTCGGGTGGCGAGTGGCGAACGGGTGAGTAACAT |
| | ATCGGAACGTACCGGGTAGCGGGGGATAACTGATCGAAAGATCAGCTAATACCGCATACGTCT |
| | TGAGAGGGAAAGCAGGGGACCTTCGGGCCTTGCGCTATCCGAGCGGCCGATATCTGATTAGCT |
| | GGTTGGCGGGGTAAAGGCCCACCAAGGCGACGATCAGTAGCGGGTCTGAGAGGATGATCCGCC |
| | ACACTGGGACTGAGACACGGCCCAGACTCCTACGGGAGGCAGCAGTGGGGAATTTTGGACAAT |
| | GGGCGCAAGCCTGATCCAGCCATGCCGCGTGTCTGAAGAAGGCCTTCGGGTTGTAAAGGACTT |
| | TTGTCAGGGAAGAAAAGGCCGTTGCCAATATCGGCGGCCGATGACGGTACCTGAAGAATAAGC |
| | ACCGGCTAACTACGTGCCAGCAGCCGCGGTAATACGTAGGGTGCGAGCGTTAATCGGAATTAC |
| | TGGGCGTAAAGCGGGCGCAGACGGTTACTTAAGCAGGATGTGAAATCCCCGGGCTCAACCCGG |
| | GAACTGCGTTCTGAACTGGGTGACTCGAGTGTGTCAGAGGGAGGTGGAATTCCACGTGTAGCA |
| | GTGAAATGCGTAGAGATGTGGAGGAATACCGATGGCGAAGGCAGCCTCCTGGGATAACACTGA |
| | CGTTCATGTCCGAAAGCGTGGGTAGCAAACAGGATTAGATACCCTGGTAGTCCACGCCCTAAA |
| | CGATGTCAATTAGCTGTTGGGCAACTTGATTGCTTGGTAGCGTAGCTAACGCGTGAAATTGAC |
| | CGCCTGGGGAGTACGGTCGCAAGATTAAAACTCAAAGGAATTGACGGGGACCCGCACAAGCGG |
| | TGGATGATGTGGATTAATTCGATGCAACGCGAAGAACCTTACCTGGTTTTGACATGTGCGGAA |
| | TCCTCCGGAGACGGAGGAGTGCCTTCGGGAGCCGTAACACAGGTGCTGCATGGCTGTCGTCAG |
| | CTCGTGTCGTGAGATGTTGGGTTAAGTCCCGCAACGAGCGCAACCCTTGTCATTAGTTGCCAT |
| | CATTCGGTTGGGCACTCTAATGAGACTGCCGGTGACAAGCCGGAGGAAGGTGGGGATGACGTC |
| | AAGTCCTCATGGCCCTTATGACCAGGGCTTCACACGTCATACAATGGTCGGTACAGAGGGTAG |
| | CCAAGCCGCGAGGCGGAGCCAATCTCACAAAACCGATCGTAGTCCGGATTGCACTCTGCAACT |
| | CGAGTGCATGAAGTCGGAATCGCTAGTAATCGCAGGTCAGCATACTGCGGTGAATACGTTCCC |
| | GGGTCTTGTACACACCGCCCGTCACACCATGGGAGTGGGGGATACCAGAAGTAGGTAGGGTAA |
| | CCGCAAGGAGTCCGCTTACCACGGTATGCTTCATGACTGGGGTGAAGTCGTAACAAGGTAGCC |
| | GTAGGGGAACCTGCGGCTGGATCATGTGGTTT-3′ (SEQ ID NO: 419) |
| A. baumannn 23S | 5′-AGTCAAGTAATTAAGTGCATGTGGTGGATGCCTTGGCAGTCAGAGGCGATGAAAGACGTG |
| | ATAGCCTGCGAAAAGCTCCGGGGAGGCGGCAAATATCCTTTGATCCGGAGATGTCTGAATGGG |
| | GGAACCCACCTACTTTAAGGTAGGTATTGCAACATGAATACATAGTGTTGCAAGGCGAACGAG |
| | GGGAAGTGAAACATCTCAGTACCCTTAGGAAAAGAAATCAATTGAGATTCCCTCAGTAGCGGC |
| | GAGCGAACGGGGATCAGCCCATTAAGTTATGTGTGTTTTAGTGGAACGCTCTGGGAAGTGCGA |
| | ACGTAGAGGGTGATATTCCCGTACACGAAAGGGCACACATAATGATGACGAGTAGGGCGAGGC |
| | ACGTGAAACCTTGTCTGAATATGGGGGGACCATCCTCCAAGGCTAAATACTCCTGACTGACCG |
| | ATAGTGAACCAGTACCGTGAGGGAAAGGCGAAAAGAACCCCTGTGAGGGGAGTGAAATAGATC |
| | CTGAAACCGCATGCATACAAGCAGTGGGAGCACCTTCGTGGTGTGACTGCGTACCTTTTGTAT |
| | AATGGGTCAGCGACTTATATTCAGTAGCGAGGTTAACCGTATAGGGGAGCCGTAGAGAAATCG |
| | AGTCTTAATAGGGCGTTTAGTTGCTGGGTATAGACCCGAAACCAGGCGATCTATCCATGAGCA |
| | GGTTGAAGGTTGGGTAACACTAACTGGAGGACCGAACCCACTGTCGTTGAAAAGCCAGGGGAT |
| | GACTTGTGGATAGGGGTGAAAGGCTAATCAAGCCTGGTGATAGCTGGTTCTCCCCGAAAGCTA |
| | TTTAGGTAGCGCCTCGGACGAATACCATAGGGGGTAGAGCACTGTTTCGGCTAGGGGGTCATC |
| | CCGACTTACCAAACCGATGCAAACTCCGAATACCTATGAGTACTATCCGGGAGACAGACTGCG |
| | GGTGCTAACGTCCGTAGTCAAGAGGAAAACAATCCAGACCGCCAGCTAAGGCCCCAAAATCAT |
| | AGTTAAGTGGGAAACGATGTGGGAAGGCATAGACAGCTAGGAGGTTGGCTTAGAAGCAGCCAC |
| | CCTTTAAAGAAAGCGTAATAGCTCACTAGTCGAGTCGGCCTGCGCGGAAGATGTAACGGGGCT |
| | AAAACTATGTGCCGAAGCTGCGGATTTGACATTAGTCAAGTGGTAGGGGAGCGTTCTGTAAGC |
| | CGATGAAGGTGTATTGAGAAGTATGCTGGAGGTATCAGAAGTGCGAATGCTGACGTGAGTAAC |
| | GACAAAACGGGTGAAAAACCCGTTCGCCGAAAGACCAAGGGTTCCAGTCCAACGTTAATCGGG |
| | GCTGGGTGAGTCGACCCCTAAGGCGAGGCCGAAAGGCGTAGTCGATGGGAAATTGGTTAATAT |
| | TCCAATACTTCTGTGTAATGCGATGAGAGGACGGAGAAGGTTAAGTCAGCCTGGCGTTGGTTG |
| | TCCAGGTGGAAGGATGTAGGTATGTATCTTAGGCAAATCCGGGGTACTCTATACTGAGATCCG |
| | ATAGCAAGCTGTACTTGTACAGCGAAGTGGCTGATACCATGCTTCCAGGAAAAGTCTCTAAGC |
| | TTCAGTTACACAGGAATCGTACCCGAAACCGACACAGGTGGTCAGGTCGAGTAGACCAAGGCG |
| | CTTGAGAGAACTCTGCTGAAGGAACTAGGCAAAATGGTACCGTAACTTCGGGAGAAGGTACGC |
| | TGTTGTTGGTGATGGAACTTGCTTCCTGAGCTGATGACAGCCGCAGAAACCAGGCCGCTGCAA |
| | CTGTTTATTAAAAACATAGCACTCTGCAAACACGAAAGTGGACGTATAGGGTGTGATGCCTGC |
| | CCGGTGCTGGAAGGTTAATTGATGGGGTTAGCGTAAGCGAAGCTCTTGATCGAAGCCCCAGTA |
| | AACGGCGGCCGTAACTATAACGGTCCTAAGGTAGCGAAATTCCTTGTCGGGTAAGTTCCGgCC |
| | TGCACGAATGGCATAATGATGGCGGCGCTGTCTCCAGCAGAGGCTCAGTGAAATCGAAATCGC |
| | TGTGAAGATGCAGTGTACCCGCGGCTAGACGGAAAGACCCCGTGAACCTTTACTGCAGCTTGA |
| | CACTGAACTTTGACCTTACTTGTGTAGGATAGGTGGGAGGCTTTGAAGTTGGAACGCTAGTTC |
| | CAATGGAGCCGTCCTTGAAATACCACCCTGGTAATGTTGAGGTTCTAACTCTGTCCCGTTATC |
| | CGGGACGAGGACCGTGTCTGGTGGGTAGTTTGACTGGGGCGGTCTCCTCCTAAAGAGTAACGG |
| | AGGAGTACGAAGGTGCGCTCAGCGTGGTCGGAAATCACGCATAGAGTATAAAGGCAAAAGCGC |
| | GCTTAACTGCGAGACCCACAAGTCGAGCAGGTACGAAAGTAGGTCTTAGTGATCCGGTGGTTC |
| | TGTATGGAAGGGCCATCGCTCAACGGATAAAAGGTACTCTGGGGATAACAGGCTGATACCGCC |
| | CAAGAGTTCATATCGACGGCGGTGTTTGGCACCTCGATGTCGGCTCATCTCATCCTGGGGCTG |
| | AAGCAGGTCCCAAGGGTATGGCTGTTCGCCATTTAAAGAGGTACGCGAGCTGGGTTTAGAACG |
| | TCGTGAGACAGTTCGGTCCCTATCTACCGTGGGCGCTGGAAATTTGAGAGGATCTGCTCCTAG |
| | TACGAGAGGACCAGAGTGGACGAACCTCTGGTGTACCGGTTGTGACGCCAGTCGCATCGCCGG |
| | GTAGCTATGTTCGGAAGGGATAACCGCTGAAAGCATCTAAGCGGGAAGCCTACCTCAAGATAA |
| | GATTTCCCTAGGAATTTATTCCTCTAAAGAGCCGTTCGAGACTAGGACGTTGATAGGTTGGAT |
| | GTGGAAGCATAGTGATATGTGAAGCTGACCAATACTAATTGCTCGTGAGGCTTGACTAT-3′ |
| | (SEQ ID NO: 420) |
| V. cholerae 23S | 5′-GGTTAAGTGACTAAGCGTACACGGTGGATGCCTGGGCAGTCAGAGGCGATGAAGGACGTA |
| | CTAACTTGCGATAAGCGCAGATAAGGCAGTAAGAGCCGTTTGAGTCTGCGATTTCCGAATGGG |
| | GAAACCCAACTGCATAAGCAGTTACTGTTAACTGAATACATAGGTTAACAGAGCAAACCGGGG |
| | GAACTGAAACATCTAAGTACCCCGAGGAGAAGAAATCAACCGAGATTCCGGTAGTAGCGGCGA |
| | GCGAACCTGGATTAGCCCTTAAGCACTCGGTGAAGTAGGTGAACAAGCTGGAAAGCTTGGCGA |
| | TACAGGGTGATAGCCCCGTAACCGACGCTTCATCGAGCGTGAAATCGAGTAGGGCGGGACACG |
| | TGATATCCTGTCTGAATATGGGGGGACCATCCTCCAAGGCTAAATACTCCTGACTGACCGATA |
| | GTGAACCAGTACCGTGAGGGAAAGGCGAAAAGAACCCCTGTGAGGGGAGTGAAATAGAACCTG |
| | AAACCGTGTACGTACAAGCAGTAGGAGCACCTTCGTGGTGTGACTGCGTACCTTTTGTATAAT |
| | GGGTCAGCGACTTATATTCAGTGGCAAGGTTAACCGTATAGGGGAGCCGTAGCGAAAGCGAGT |
| | CTTAATTGGGCGCTCAGTCTCTGGATATAGACCCGAAACCGGGTGATCTAGCCATGGGCAGGT |
| | TGAAGGTTGAGTAACATCAACTGGAGGACCGAACCGACTAATGTTGAAAAATTAGCGGATGAC |
| | TTGTGGCTAGGGGTGAAAGGCCAATCAAACTCGGAGATAGCTGGTTCTCCCCGAAAGCTATTT |
| | AGGTAGCGCCTCGGACGAATACTACTGGGGGTAGAGCACTGTTAAGGCTAGGGGGTCATCCCG |
| | ACTTACCAACCCTTTGCAAACTCCGAATACCAGTAAGTACTATCCGGGAGACACACGGCGGGT |
| | GCTAACGTCCGTCGTGGAGAGGGAAACAACCCAGACCGCCAGCTAAGGTCCCAAAGTATTGCT |
| | AAGTGGGAAACGATGTGGGAAGGCTCAGACAGCTAGGATGTTGGCTTAGAAGCAGCCATCATT |
| | TAAAGAAAGCGTAATAGCTCACTAGTCGAGTCGGCCTGCGCGGAAGATGTAACGGGGCTAAGC |
| | AATACACCGAAGCTGCGGCAATGTCTTTTAGATATTGGGTAGGGGAGCGTTCTGTAAGCCGTT |
| | GAAGGTGAATCGTAAGGTTTGCTGGAGGTATCAGAAGTGCGAATGCTGACATGAGTAACGACA |
| | AAGGGGGTGAAAAACCTCCTCGCCGGAAGACCAAGGGTTCCTGTCCAACGTTAATCGGGGCAG |
| | GGTGAGTCGACCCCTAAGGTGAGGCCGAAAGGCGTAATCGATGGGAAACGGGTTAATATTCCC |
| | GTACTTCTGACTATTGCGATGGGGGGACGGAGAAGGCTAGGTGGGCCAGGCGACGGTTGTCCT |
| | GGTTCAAGTGCGTAGGCTTGAGAGTTAGGTAAATCCGGCTCTCTTTAAGGCTGAGACACGACG |
| | TCGAGCTGCTACGGCAGTGAAGTCATTGATGCCATGCTTCCAGGAAAAGCCTCTAAGCTTCAG |
| | ATAGTCAGGAATCGTACCCCAAACCGACACAGGTGGTCGGGTAGAGAATACCAAGGCGCTTGA |
| | GAGAACTCGGGTGAAGGAACTAGGCAAAATGGTACCGTAACTTCGGGAGAAGGTACGCTCTTG |
| | ATGGTGAAGTCCCTCGCGGATGGAGCTGACGAGAGTCGCAGATACCAGGTGGCTGCAACTGTT |
| | TATTAAAAACACAGCACTGTGCAAAATCGCAAGATGACGTATACGGTGTGACGCCTGCCCGGT |
| | GCCGGAAGGTTAATTGATGGGGTTAGCGCAAGCGAAGCTCTTGATCGAAGCCCCGGTAAACGG |
| | CGGCCGTAACTATAACGGTCCTAAGGTAGCGAAATTCCTTGTCGGGTAAGTTCCGACCTGCAC |
| | GAATGGCGTAATGATGGCCACGCTGTCTCCACCCGAGACTCAGTGAAATTGAAATCGCTGTGA |
| | AGATGCAGTGTACCCGCGGCTAGACGGAAAGACCCCGTGAACCTTTACTACAGCTTGGCACTG |
| | AACATTGAACCTACATGTGTAGGATAGGTGGGAGTCTATGAAGACGTGACGCCAGTTGCGTTG |
| | GAGCCGTCCTTGAAATACCACCCTTGTATGTTTGATGTTCTAACGTTGGCCCCTAATCGGGGT |
| | TGCGGACAGTGCCTGGTGGGTAGTTTGACTGGGGCGGTCTCCTCCCAAAGAGTAACGGAGGAG |
| | CACGAAGGTGGGCTAATCACGGTTGGACATCGTGAGGTTAGTGCAATGGCATAAGCCCGCTTA |
| | ACTGCGAGAATGACGGTTCGAGCAGGTGCGAAAGCAGGTCATAGTGATCCGGTGGTTCTGTAT |
| | GGAAGGGCCATCGCTCAACGGATAAAAGGTACTCCGGGGATAACAGGCTGATACCGCCCAAGA |
| | GTTCATATCGACGGCGGTGTTTGGCACCTCGATGTCGGCTCATCACATCCTGGGGCTGAAGTC |
| | GGTCCCAAGGGTATGGCTGTTCGCCATTTAAAGTGGTACGCGAGCTGGGTTTAGAACGTCGTG |
| | AGACAGTTCGGTCCCTATCTGCCGTGGGCGTTGGAAGATTGAAGGGGGCTGCTCCTAGTACGA |
| | GAGGACCGGAGTGGACGAACCTCTGGTGTTCGGGTTGTGTCGCCAGACGCATTGCCCGGTAGC |
| | TAAGTTCGGAATTGATAAGCGCTGAAAGCATCTAAGCGCGAAGCGAGCCCTGAGATGAGTCTT |
| | CCCTGACGGTTTAACCGTCCTAAAGGGTTGTTCGAGACTAGAACGTTGATAGGCAGGGTGTGT |
| | AAGCGTTGTGAGGCGTTGAGCTAACCTGTACTAATTGCCCGTGAGGCTTAACCAT-3′ |
| | (SEQ ID NO: 421) |
| P. aeruginosa 23S | 5′-GGTCAAGTGAAGAAGCGCATACGGTGGATGCCTTGGCAGTCAGAGGCGATGAAAGACGTG |
| | GTAGCCTGCGAAAAGCTTCGGGGAGTCGGCAAACAGACTTTGATCCGGAGATCTCTGAATGGG |
| | GGAACCCACCTAGGATAACCTAGGTATCTTGTACTGAATCCATAGGTGCAAGAGGCGAACCAG |
| | GGGAACTGAAACATCTAAGTACCCTGAGGAAAAGAAATCAACCGAGATTCCCTTAGTAGTGGC |
| | GAGCGAACGGGGATTAGCCCTTAAGCTTCATTGATTTTAGCGGAACGCTCTGGAAAGTGCGGC |
| | CATAGTGGGTGATAGCCCCGTACGCGAAAGGATCTTTGAAGTGAAATCGAGTAGGACGGAGCA |
| | CGAGAAACTTTGTCTGAACATGGGGGGACCATCCTCCAAGGCTAAATACTACTGACTGACCGA |
| | TAGTGAACCAGTACCGTGAGGGAAAGGCGAAAAGAACCCCGGAGAGGGGAGTGAAATAGAACC |
| | TGAAACCGTATGCGTACAAGCAGTGGGAGCCTACTTGTTAGGTGACTGCGTACCTTTTGTATA |
| | ATGGGTCAGCGACTTATATTCAGTGGCAAGCTTAACCGTATAGGGTAGGCGTAGCGAAAGCGA |
| | GTCTTAATAGGGCGTTTAGTCGCTGGGTATAGACCCGAAACCGGGCGATCTATCCATGAGCAG |
| | GTTGAAGGTTAGGTAACACTGACTGGAGGACCGAACCCACTCCCGTTGAAAAGGTAGGGGATG |
| | ACTTGTGGATCGGAGTGAAAGGCTAATCAAGCTCGGAGATAGCTGGTTCTCCTCGAAAGCTAT |
| | TTAGGTAGCGCCTCATGTATCACTCTGGGGGGTAGAGCACTGTTTCGGCTAGGGGGTCATCCC |
| | GACTTACCAAACCGATGCAAACTCCGAATACCCAGAAGTGCCGAGCATGGGAGACACACGGCG |
| | GGTGCTAACGTCCGTCGTGAAAAGGGAAACAACCCAGACCGCCAGCTAAGGTCCCAAAGTTGT |
| | GGTTAAGTGGTAAACGATGTGGGAAGGCTTAGACAGCTAGGAGGTTGGCTTAGAAGCAGCCAC |
| | CCTTTAAAGAAAGCGTAATAGCTCACTAGTCGAGTCGGCCTGCGCGGAAGATGTAACGGGGCT |
| | CAAACCACACACCGAAGCTGCGGGTGTCACGTAAGTGACGCGGTAGAGGAGCGTTCTGTAAGC |
| | CTGTGAAGGTGAGTTGAGAAGCTTGCTGGAGGTATCAGAAGTGCGAATGCTGACATGAGTAAC |
| | GACAATGGGTGTGAAAAACACCCACGCCGAAAGACCAAGGGTTCCTGCGCAACGTTAATCGAC |
| | GCAGGGTTAGTCGGTTCCTAAGGCGAGGCTGAAAAGCGTAGTCGATGGGAAACAGGTTAATAT |
| | TCCTGTACTTCTGGTTACTGCGATGGAGGGACGGAGAAGGCTAGGCCAGCTTGGCGTTGGTTG |
| | TCCAAGTTTAAGGTGGTAGGCTGAAATCTTAGGTAAATCCGGGGTTTCAAGGCCGAGAGCTGA |
| | TGACGAGTCGTCTTTTAGATGACGAAGTGGTTGATGCCATGCTTCCAAGAAAAGCTTCTAAGC |
| | TTCAGGTAACCAGGAACCGTACCCCAAACCGACACAGGTGGTCGGGTAGAGAATACCAAGGCG |
| | CTTGAGAGAACTCGGGTGAAGGAACTAGGCAAAATGGCACCGTAACTTCGGGAGAAGGTGCGC |
| | CGGCTAGGGTGAAGGATTTACTCCGTAAGCTCTGGCTGGTCGAAGATACCAGGCCGCTGCGAC |
| | TGTTTATTAAAAACACAGCACTCTGCAAACACGAAAGTGGACGTATAGGGTGTGACGCCTGCC |
| | CGGTGCCGGAAGGTTAATTGATGGGGTTAGCGCAAGCGAAGCTCTTGATCGAAGCCCCGGTAA |
| | ACGGCGGCCGTAACTATAACGGTCCTAAGGTAGCGAAATTCCTTGTCGGGTAAGTTCCGACCT |
| | GCACGAATGGCGTAACGATGGCGGCGCTGTCTCCACCCGAGACTCAGTGAAATTGAAATCGCT |
| | GTGAAGATGCAGTGTATCCGCGGCTAGACGGAAAGACCCCGTGAACCTTTACTGTAGCTTTGC |
| | ACTGGACTTTGAGCCTGCTTGTGTAGGATAGGTGGGAGGCTTTGAAGCGTGGACGCCAGTTCG |
| | CGTGGAGCCATCCTTGAAATACCACCCTGGCATGCTTGAGGTTCTAACTCTGGTCCGTAATCC |
| | GGATCGAGGACAGTGTATGGTGGGCAGTTTGACTGGGGCGGTCTCCTCCTAAAGAGTAACGGA |
| | GGAGTACGAAGGTGCGCTCAGACCGGTCGGAAATCGGTCGCAGAGTATAAAGGCAAAAGCGCG |
| | CTTGACTGCGAGACAGACACGTCGAGCAGGTACGAAAGTAGGTCTTAGTGATCCGGTGGTTCT |
| | GTATGGAAGGGCCATCGCTCAACGGATAAAAGGTACTCCGGGGATAACAGGCTGATACCGCCC |
| | AAGAGTTCATATCGACGGCGGTGTTTGGCACCTCGATGTCGGCTCATCACATCCTGGGGCTGA |
| | AGCCGGTCCCAAGGGTATGGCTGTTCGCCATTTAAAGTGGTACGCGAGCTGGGTTTAGAACGT |
| | CGTGAGACAGTTCGGTCCCTATCTGCCGTGGACGTTTGAGATTTGAGAGGGGCTGCTCCTAGT |
| | ACGAGAGGACCGGAGTGGACGAACCTCTGGTGTTCCGGTTGTCACGCCAGTGGCATTGCCGGG |
| | TAGCTATGTTCGGAAAAGATAACCGCTGAAAGCATCTAAGCGGGAAACTTGCCTCAAGATGAG |
| | ATCTCACTGGGAACTTGATTCCCCTGAAGGGCCGTCGAAGACTACGACGTTGATAGGCTGGGT |
| | GTGTAAGCGTTGTGAGGCGTTGAGCTAACCAGTACTAATTGCCCGTGAGGCTTGACCAT-3′ |
| | (SEQ ID NO: 422) |
| S. marcescens 23S | 5′-GGTTAAGTGACTAAGCGTACACGGTGGATGCCTAGGCAGTCAGAGGCGATGAAGGGCGTG |
| | CTAATCTGCGAAAAGCGTCGGTAAGGTGATATGAACCGTTATAACCGGCGATACCCGAATGGG |
| | GAAACCCAGTGTGTTTCGACACACTATCATGTCATGAATACATAGTGGCATGAGGCGAACCGG |
| | GGGAACTGAAACATCTAAGTACCCCGAGGAAAAGAAATCAACCGAGATTCCCCCAGTAGCGGC |
| | GAGCGAACGGGGAGGAGCCCAGAACCTGAATCGGCTTGTGTGTTAGTGGAAGCGTCTGGAAAG |
| | TCGCGCAGCAAAGGGTGATAGCCCCGTACACTAAAATGCACAGGTCGTGAGTTCGATGAGTAG |
| | GGCGGGACACGTGACATCCTGTCTGAATATGGGGGGACCATCCTCCAAGGCTAAATACTCCTG |
| | ACTGACCGATAGTGAACCAGTACCGTGAGGGAAAGGCGAAAAGAACCCCGGCGAGGGGAGTGA |
| | AATAGAACCTGAAACCGTGTACGTACAAGCAGTGGGAGCACCTTCGTGGTGTGACTGCGTACC |
| | TTTTGTATAATGGGTCAGCGACTTATATTTTGTAGCAAGGTTAACCGTATAGGGGAGCCGTAG |
| | GGAAACCGAGTCTTAACTGGGCGAATAGTTGCAAGGTATAGACCCGAAACCCGGTGATCTAGC |
| | CATGGGCAGGTTGAAGGTTGGGTAACACTAACTGGAGGACCGAACCGACTAATGTTGAAAAAT |
| | TAGCGGATGACTTGTGGCTGGGGGTGAAAGGCCAATCAAACCGGGAGATAGCTGGTTCTCCCC |
| | GAAAGCTATTTAGGTAGCGCCTCGTGAACTCATCTTCGGGGGTAGAGCACTGTTTCGGCTAGG |
| | GGGCCATCCCGGCTTACCAAACCGATGCAAACTCCGAATACCGAAGAATGTTATCACGGGAGA |
| | CACACGGCGGGTGCTAACGTCCGTCGTGAAGAGGGAAACAACCCAGACCGCCAGCTAAGGTCC |
| | CAAAGTCATGGTTAAGTGGGAAACGATGTGGGAAGGCATAGACAGCCAGGATGTTGGCTTAGA |
| | AGCAGCCATCATTTAAAGAAAGCGTAATAGCTCACTGGTCGAGTCGGCCTGCGCGGAAGATGT |
| | AACGGGGCTAAACCATGCACCGAAGCTGCGGCAGCGACGCTTAGGCGTTGTTGGGTAGGGGAG |
| | CGTTCTGTAAGCCGTTGAAGGTGGCCTGTGAGGGTTGCTGGAGGTATCAGAAGTGCGAATGCT |
| | GACATAAGTAACGATAAAGCGGGTGAAAAGCCCGCTCGCCGGAAGACCAAGGGTTCCTGTCCA |
| | ACGTTAATCGGGGCAGGGTGAGTCGACCCCTAAGGCGAGGCTGAAAAGCGTAGTCGATGGGAA |
| | ACAGGTTAATATTCCTGTACTTGGTGTTACTGCGAAGGGGGGACGGAGAAGGCTAGGCTAGCC |
| | GGGCGACGGTTGTCCCGGTTTAAGCGTGTAGGGGGTGTGACCTGGTAAATCCGGTTGCATATT |
| | AACCCTGAGGCGTGATGACGATGCACTACGGTGCAGAAGTAGTTGATGCCCTGCTTCCAGGAA |
| | AATCCTCTAAGCATCAGGTAACATTAAATCGTACCCCAAACCGACACAGGTGGTCAGGTAGAG |
| | AATACCAAGGCGCTTGAGAGAACTCGGGTGAAGGAACTAGGCAAAATGGTGCCGTAACTTCGG |
| | GAGAAGGCACGCTGGCATGTAGGTGAAGTCCCTCGCGGATGGAGCTGAAGCCAGTCGAAGATA |
| | CCAGCTGGCTGCAACTGTTTAATAAAAACACAGCACTGTGCAAACACGAAAGTGGACGTATAC |
| | GGTGTGACGCCTGCCCGGTGCTGGAAGGTTAATTGATGGGGTCAGCCGCAAGGCGAAGCTCTT |
| | GATCGAAGCCCCAGTAAACGGCGGCCGTAACTATAACGGTCCTAAGGTAGCGAAATTCCTTGT |
| | CGGGTAAGTTCCGACCTGCACGAATGGCGTAATGATGGCCAGGCTGTCTCCACCCGAGACTCA |
| | GTGAAATTGAACTCGCTGTGAAGATGCAGTGTACCCGCGGCAAGACGGAAAGACCCCGTGAAC |
| | CTTTACTATAGCTTGACACTGAACATTGAGCCTTGATGTGTAGGATAGGTGGGAGGCTTTGAA |
| | GCGTGGACGCCAGTCTGCGTGGAGCCATCCTTGAAATACCACCCTTTAATGTTTGATGTTCTA |
| | ACTCGGCCCCGTAATCCGGGGTGAGGACAGTGTCTGGTGGGTAGTTTGACTGGGGCGGTCTCC |
| | TCCCAAAGAGTAACGGAGGAGCACGAAGGTTAGCTAATCACGGTCGGACATCGTGAGGTTAGT |
| | GCAAAGGCATAAGCTAGCTTGACTGCGAGAGTGACGGCTCGAGCAGGTACGAAAGTAGGTCTT |
| | AGTGATCCGGTGGTTCTGAATGGAAGGGCCATCGCTCAACGGATAAAAGGTACTCCGGGGATA |
| | ACAGGCTGATACCGCCCAAGAGTTCATATCGACGGCGGTGTTTGGCACCTCGATGTCGGCTCA |
| | TCACATCCTGGGGCTGAAGTAGGTCCCAAGGGTATGGCTGTTCGCCATTTAAAGTGGTACGCG |
| | AGCTGGGTTTAGAACGTCGTGAGACAGTTCGGTCCCTATCTGCCGTGGGCGTTGGAAGATTGA |
| | GAGGGGTTGCTCCTAGTACGAGAGGACCGGAGTGAACGCACCACTGGTGTTCGGGTTGTCATG |
| | CCAATGGCATTGCCCGGTAGCTAAGTGCGGAAAAGATAAGCGCTGAAAGCATCTAAGCGCGAA |
| | ACTTGCCTCAAGATGAGTCTTCCCTGGGCCTTTAAGGTCCCTGAAGGAACGTTTAAGACTAAG |
| | ACGTTGATAGGCTGGGTGTGTAAGTGCAGCGATGCATTGAGCTAACCAGTACTAATGATCCGT |
| | GAGGCTTAACCTT-3′ (SEQ ID NO: 423) |
| S. enterica 23S | 5′-GGTTAAGCGACTAAGCGTACACGGTGGATGCCCTGGCAGTCAGAGGCGATGAAGGGCGTG |
| | CTAATCTGCGATAAGCGCCGGTAAGGTGATATGAACCGTTATAACCGGCGATACCCGAATGGG |
| | GAAACCCAGTGTGATTCGTCACACTATCATTAACTGAATCCATAGGTTAATGAGGCGAACCGG |
| | GGGAACTGAAACATCTAAGTACCCCGAGGAAAAGAAATCAACCGAGATTCCCCCAGTAGCGGC |
| | GAGCGAACGGGGAGGAGCCCAGAGCCTGAATCAGCATGTGTGTTAGTGGAAGCGTCTGGAAAG |
| | GTGCGCGATACAGGGTGACAGCCCCGTACACAAAAGCGCATGTGCTGTGAGCTCGATGAGTAG |
| | GGCGGGACACGTGGTATCCTGTCTGAATATGGGGGGACCATCCTCCAAGGCTAAATACTCCTG |
| | ACTGACCGATAGTGAACCAGTACCGTGAGGGAAAGGCGAAAAGAACCCCGGCGAGGGGAGTGA |
| | AAAAGAACCTGAAACCGTGTACGTACAAGCAGTGGGAGCACAGGTTTACCTGTGTGACTGCGT |
| | ACCTTTTGTATAATGGGTCAGCGACTTATATTCTGTAGCAAGGTTAACCGTATAGGGGAGCCG |
| | TAGGGAAACCGAGTCTTAACCGGGCGTTAAGTTGCAGGGTATAGACCCGAAACCCGGTGATCT |
| | AGCCATGGGCAGGTTGAAGGTTGGGTAACACTAACTGGAGGACCGAACCGACTAATGTTGAAA |
| | AATTAGCGGATGACCTGTGGCTGGGGGTGAAAGGCCAATCAAACCGGGAGATAGCTGGTTCTC |
| | CCCGAAAGCTATTTAGGTAGCGCCTCGTGAATTCATCTCCGGGGGTAGAGCACTGTTTCGGCT |
| | AGGGGGCCATCCCGGCTTACCAACCCGATGCAAACTGCGAATACCGGAGAATGTTATCACGGG |
| | AGACACACGGCGGGTGCTAACGTCCGTCGTGAAGAGGGAAACAACCCAGACCGCCAGCTAAGG |
| | TCCCAAAGTCATGGTTAAGTGGGAAACGATGTGGGAAGGCCCAGACAGCCAGGATGTTGGCTT |
| | AGAAGCAGCCATCATTTAAAGAAAGCGTAATAGCTCACTGGTCGAGTCGGCCTGCGCGGAAGA |
| | TGTAACGGGGCTAAACCATGCACCGAAGCTGCGGCAGCGAACGTATCACCCAAGACAACTTTA |
| | CGGAGTTGACGATTGACGGAGCGAAGCGACGTCAAAGCGTTCATTAAAGTCGAGTTGGCTTAG |
| | GGATACGTTCGTTGGGTAGGGGAGCGTTCTGTAAGCCTGTGAAGGTGTGTCGTGAGGCATGCT |
| | GGAGGTATCAGAAGTGCGAATGCTGACATAAGTAACGATAAAGCGGGTGAAAAGCCCGCTCGC |
| | CGGAAGACCAAGGGTTCCTGTCCAACGTTAATCGGGGCAGGGTGAGTCGACCCCTAAGGCGAG |
| | GCCGAAAGGCGTAGTCGATGGGAAACGGGTTAATATTCCCGTACTTGGTGTTACTGCGAAGGG |
| | GGGACGGAGAAGGCTATGTTGGCCGGGCGACGGTTGTCCCGGTTTAAGCGTGTAGGTGTGTGT |
| | TCCAGGTAAATCCGGTTCACTTTAACACTGAGGCGTGACGACGAGGCACTACGGTGCTGAAGC |
| | AACAAATGCCCTGCTTCCAGGAAAAGCCTCTAAGCATCAGGTAACACGAAATCGTACCCCAAA |
| | CCGACACAGGTGGTCAGGTAGAGAATACCAAGGCGCTTGAGAGAACTCGGGTGAAGGAACTAG |
| | GCAAAATGGTGCCGTAACTTCGGGAGAAGGCACGCTGACACGTAGGTGAAGTGATTTACTCAT |
| | GGAGCTGAAGTCAGTCGAAGATACCAGCTGGCTGCAACTGTTTATTAAAAACACAGCACTGTG |
| | CAAACACGAAAGTGGACGTATACGGTGTGACGCCTGCCCGGTGCCGGAAGGTTAATTGATGGG |
| | GTCAGCGCAAGCGAAGCTCCTGATCGAAGCCCCGGTAAACGGCGGCCGTAACTATAACGGTCC |
| | TAAGGTAGCGAAATTCCTTGTCGGGTAAGTTCCGACCTGCACGAATGGCGTAATGATGGCCAG |
| | GCTGTCTCCACCCGAGACTCAGTGAAATTGAACTCGCTGTGAAGATGCAGTGTACCCGCGGCA |
| | AGACGGAAAGACCCCGTGAACCTTTACTATAGCTTGACACTGAACATTGAGCCTTGATGTGTA |
| | GGATAGGTGGGAGGCTTTGAAGTGTGGACGCCAGTCTGCATGGAGCCGACCTTGAAATACCAC |
| | CCTTTAATGTTTGATGTTCTAACGTGGACCCGTAATCCGGGTTGCGGACAGTGTCTGGTGGGT |
| | AGTTTGACTGGGGCGGTCTCCTCCTAAAGAGTAACGGAGGAGCACGAAGGTTGGCTAATCCTG |
| | GTCGGACATCAGGAGGTTAGTGCAATGGCATAAGCCAGCTTGACTGCGAGCGTGACGGCGCGA |
| | GCAGGTGCGAAAGCAGGTCATAGTGATCCGGTGGTTCTGAATGGAAGGGCCATCGCTCAACGG |
| | ATAAAAGGTACTCCGGGGATAACAGGCTGATACCGCCCAAGAGTTCATATCGACGGCGGTGTT |
| | TGGCACCTCGATGTCGGCTCATCACATCCTGGGGCTGAAGTAGGTCCCAAGGGTATGGCTGTT |
| | CGCCATTTAAAGTGGTACGCGAGCTGGGTTTAGAACGTCGTGAGACAGTTCGGTCCCTATCTG |
| | CCGTGGGCGCTGGAGAACTGAGGGGGGCTGCTCCTAGTACGAGAGGACCGGAGTGGACGCATC |
| | ACTGGTGTTCGGGTTGTCATGCCAATGGCACTGCCCGGTAGCTAAATGCGGAAGAGATAAGTG |
| | CTGAAAGCATCTAAGCACGAAACTTGCCCCGAGATGAGTTCTCCCTGAGACTTAGAGTCTCCT |
| | GAAGGAACGTTGAAGACGACGACGTTGATAGGCCGGGTGTGTAAGCGCAGCGATGCGTTGAGC |
| | TAACCGGTACTAATGAACCGTGAGGCTTAACCTT-3′ (SEQ ID NO: 424) |
| N. gonorrhoeae 23S | 5′-AGTCAAGTGAATAAGTGCATCAGGCGGATGCCTTGGCGATGATAGGCGACGAAGGACGTG |
| | TAAGCCTGCGAAAAGCGCGGGGGAGCTGGCAATAAAGCtATGATtCCGCGaTGTCCGAATGGG |
| | GAAACCCACTGCATTCTGTGCAGTATCCTAAGTTGAATACATAGGCTTAGAGAAGCGAACCCG |
| | GAGAACTGAaCCATCTAAGTACCCGGAGGAAAAGAAATCAACCGAGATTCCGCAAGTAGTGGC |
| | GAGCGAACGCGGAGGAGCCTGTACGTAATAACTGTCGAGaTAGAAGAACAAGCTGGGAAGCTT |
| | GACCATAGCGGGTGACAGTCCCGTATTCGAAATCTCAACAGCGGTACTAAGCGTACGAAAAGT |
| | AGGGCGGGACACGTGAAATCCTGTCTGAATATGGGGGGACCATCCTCCAAGGCTAAATACTCA |
| | TCATCGACCGATAGTGAACCAGTACCGTGAGGGAAAGGCGAAAAGAACCCCGGGAGGGGAGTG |
| | AAACAGAACCTGAAACCTGATGCATACAAACAGTGGGAGCGCCCTAGTGGTGTGACTGCGTAC |
| | CTTTTGTATAATGGGTCAACGACTTACATTCAGTAGCGAGCTTAACCGGATAGGGGAGGCGTA |
| | GGGAAACCGAGTCTTAATAGGGCGATGAGTTGCTGGGTGTAGACCCGAAACCGAGTGATCTAT |
| | CCATGGtCAGGTTGAAGGTGCCGTAACAGGTACTGGAGGACCGAACCCACGCATGTTGCAAAA |
| | TGCGGGGATGAGCTGTGGGTAGGGGTGAAAGGCTAAACAAACTCGGAGATAGCTGGTTCTCCC |
| | CGAAAACTATTTAGGTAGTGCCTCGAGCAAGACACTGATGGGGGTAAAGCACTGTTATGGCTA |
| | GGGGGTTATTGCAACTTACCAACCCATGGCAAACTCAGAATACCATCAAGTGGTTCCTCGGGA |
| | GACAGACAGCGGGTGCTAACGTCCGTTGTCAAGAGGGAAACAACCCAGACCGCCGGCTAAGGT |
| | CCCAAATGATAGATTAAGTGGTAAACGAAGTGGGAAGGCACAGACAGCCAGGATGTTGGCTTA |
| | GAAGCAGCCATCATTTAAAGAAAGCGTAATAGCTCACTGGTCGAGTCGTCCTGCGCGGAAGAT |
| | GTAACGGGGCTCAAATCTATAACCGAAGCTGCGGATGCCGGTTTACCGGCATGGTAGGGGAGC |
| | GTTCTGTAGGCTGATGAAGGTGCATTGTAAAGTGTGCTGGAGGTATCAGAAGTGCGAATGTTG |
| | ACATGAGTAGCGATAAAGCGGGTGAAAAGCCCGCTCGCCGAAAGCCCAAGGTTTCCTACGCAA |
| | CGTTCATCGGCGTAGGGTaAGTCGGCCCCTAAGGCGAGGCAGAAATGCGTAGTCGATGGGAAA |
| | CAGGTTAATATTCCTGTACTTGATTCAAATGCGATGTGGGGACGGAGAAGGTTAGGTTGGCAA |
| | GCTGTTGGAATAGCTTGTTTAAGCCGGTAGGTGGAAGACTTAGGCAAATCCGGGTTTTCTTAA |
| | CACCGAGAAGTGATGACGAGTGTCTACGGACACGAAGCAACCGATACCACGCTTCCAGGAAAA |
| | GCCACTAAGCTTCAGTTTGAATCGAACCGTACCGCAAACCGACACAGGTGGGCAGGATGAGAA |
| | TTCTAAGGCGCTTGAGAGAACTCGGGAGAAGGAACTCGGCAAATTGATACCGTAACTTCGGGA |
| | GAAGGTATGCCCTCTAAGGTTAAGGACTTGCTCCGTAAGCCCCGGAGGGTCGCAGAGAATAGG |
| | TGGCTGCGACTGTTTATTAAAAACACAGCACTCTGCCAACACGAAAGTGGACGTATAGGGTGT |
| | GACGCCTGCCCGGTGCCGGAAGGTTAATTGAAGATGTGCAAGCATCGGATCGAAGCCCCGGTA |
| | AACGGCGGCCGTAACTATAACGGTCCTAAGGTAGCGAAATTCCTTGTCGGGTAAGTTCCGACC |
| | CGCACGAATGGCGTAACGATGGCCACACTGTCTCCTCCCGAGACTCAGCGAAGTTGAAGTGGT |
| | TGTGAAGATGCAATCTACCCGCTGCTAGACGGAAAGACCCCGTGAACCTTTACTGTAGCTTTG |
| | CATTGGACTTTGAAGTCACTTGTGTAGGATAGGTGGGAGGCTTGGAAGCAGAGACGCCAGTCT |
| | CTGTGGAGTCGTCCTTGAAATACCACCCTGGTGTCTTTGAGGTTCTAACCCAGACCCGTCATC |
| | CGGGTCGGGGACCGTGCATGGTAGGCAGTTTGACTGGGGCGGTCTCCTCCCAAAGCGTAACGG |
| | AGGAGTTCGAAGGTTACCTAGGTCCGGTCGGAAATCGGACTGATAGTGCAATGGCAAAAGGTA |
| | GCTTAACTGCGAGACCGACAAGTCGGGCAGGTGCGAAAGCAGGACATAGTGATCCGGTGGTTC |
| | TGTATGGAAGGGCCATCGCTCAACGGATAAAAGGTACTCCGGGGATAACAGGCTGATTCCGCC |
| | CAAGAGTTCATATCGACGGCGGAGTTTGGCACCTCGATGTCGGCTCATCACATCCTGGGGCTG |
| | TAGTCGGTCCCAAGGGTATGGCTGTTCGCCATTTAAAGTGGTACGTGAGCTGGGTTTAAAACG |
| | TCGTGAGACAGTTTGGTCCCTATCTGCAGTGGGCGTTGGAAGTTTGACGGGGGCTGCTCCTAG |
| | TACGAGAGGACCGGAGTGGACGAACCTCTGGTGTACCGGTTGTAACGCCAGTTGCATAGCCGG |
| | GTAGCTAAGTTCGGAAGAGATAAGCGCTGAAAGCATCTAAGCGCGAAACTCGCCTGAAGATGA |
| | GACTTCCCTTGCGGTTTAACCGCACTAAAGGGTCGTTCGAGACCAGGACGTTGATAGGTGGGG |
| | TGTGGAAGCGCGGTAACGCGTGAAGCTAACCCATACTAATTGCCCGTGAGGCTTGACTCT-3′ |
| | (SEQ ID NO: 425) |
| A. baumannn 5S | 5′-GTGCTGGCGACCATAGCAAGAGTGAACCACCTGATCCCTTCCCGAACTCAGAAGTGAAAC |
| | CTCTTAGCGCTGATGGTAGTGTGGGGTTACCCATGTGAGAGTAAGTCATCGCCAGCTCA-3′ |
| | (SEQ ID NO: 426) |
| V. cholerae 5S | 5′-TGCTTGGCGACCATAGCGTTTTGGACCCACCTGACTCCATCCCGAACTCAGAAGTGAAAC |
| | GAAACAGCGTCGATGGTAGTGTGGGGTCTCCCCATGTGAGAGTAGAACATCGCCAGGCTT-3′ |
| | (SEQ ID NO: 427) |
| P. aeruginosa 5S | 5′-TGCTTGACGATCATAGAGCGTTGGAACCACCTGATCCCTTCCCGAACTCAGAAGTGAAAC |
| | GACGCATCGCCGATGGTAGTGTGGGGTCTCCCCATGTGAGAGTAGGTCATCGTCAAGCTC-3′ |
| | (SEQ ID NO: 428) |
| S. marcescens 5S | 5′-GCCTGGCGGCAATAGCGCGGTGGTCCCACCTGACCCCATGCCGAACTCAGAAGTGAAACG |
| | CCGTAGCGCCGATGGTAGTGTGGGGTCTCCCCATGCGAGAGTAGGACACTGCCAGGCAT-3′ |
| | (SEQ ID NO: 429) |
| S. enterica 5S | 5′-TGCCTGGCGGCCGTAGCGCGGTGGTCCCACCTGACCCCATGCCGAACTCAGAAGTGAAAC |
| | GCCGTAGCGCCGATGGTAGTGTGGGGTCTCCCCATGCGAGAGTAGGGAACTGCCAGGCAT-3′ |
| | (SEQ ID NO: 430) |
| N. gonorrhoeae 5S | 5′-GTTTGGCGGCCATAGCGAGTTGGTCCCACGCCTTCCCATCCCGAACAGGACCGTGAAACG |
| | ACTCAGCGCCGATGATAGTGTGGTTCTTCCATGCGAAAGTAGGTCACTGCCAAACAC-3′ |
| | (SEQ ID NO: 431) |

TABLE 4
Exemplified and Expressly Contemplated Heterologous S20,
S16, S1 and S15 r-Protein Coding Sequences and Encoded r-Proteins

| Name | Sequence |
|---|---|
| N. gonorrhoeae | 5′-ATGGCAAACAGCGCACAAGCACGCAAACGTGCCCGCCAGTCCGTCAAACAACGCGCCCA |
| S20 RNA | CAACGCTAGCCTGCGTACCGCATTCCGCACCGCAGTGAAAAAAGTATTGAAAGCAGTCGAAG |
| | CAGGCGATAAAGCTGCCGCACGAGCGGTTTACCAAGAGTCCGTCAAAGTCATCGACCGCATC |
| | GCCGACAAAGGCGTGTTCCACAAAAACAAAGCGGCTCGCCACAAAAGCCGCCTGTCTGCAAA |
| | AGTAAAAGCACTGGCTTGA-3′ (SEQ ID NO: 432) |
| N. gonorrhoeae | N-MANSAQARKRARQSVKQRAHNASLRTAFRTAVKKVLKAVEAGDKAAARAVYQESVKVIDR |
| S20 Protein | IADKGVFHKNKAARHKSRLSAKVKALA-C (SEQ ID NO: 433) |
| N. gonorrhoeae | 5′-ATGGTAGTTATCCGTTTGGCACGCGGCGGCTCGAAACACCGCCCCTTCTACAACGTCAT |
| S20 Protein | CGTTACTGACTCACGCAGCCGCCGCGACGGCCGCTTCATCGAACGCGTAGGCTTCTACAACC |
| | CCGTAGCCAACGAAAAACAAGAGCGCGTCCGCCTCAATGCAGACCGCCTGAACCACTGGATT |
| | GCACAAGGCGCGCAAGTCAGCGACTCCGTTGCAAAACTGATTAAAGAACAAAAAGCCGTCTA |
| | A-3′ (SEQ ID NO: 434) |
| N. gonorrhoeae | N-MVVIRLARGGSKHRPFYNVIVTDSRSRRDGRFIERVGFYNPVANEKQERVRLNADRLNHW |
| S16 Protein | IAQGAQVSDSVAKLIKEQKAV-C (SEQ ID NO: 435) |
| N. gonorrhoeae | 5′-ATGTCTATGGAAAATTTTGCTCAGCTGTTGGAAGAAAGCTTTACCCTGCAAGAAATGAA |
| S1 RNA | CCCGGGTGAGGTGATTACCGCTGAAGTAGTGGCAATCGACCAAAACTTCGTTACCGTAAACG |
| | CAGGTCTGAAATCAGAATCCCTGATCGATGTAGCTGAATTCAAAAACGCTCAAGGCGAAATT |
| | GAAGTTAAAGTCGGCGACTTCGTTACCGTTACCATCGAATCCGTCGAAAACGGCTTCGGCGA |
| | AACCAAACTGTCCCGCGAAAAAGCCAAACGCGCAGCCGATTGGATCGCTTTGGAAGAAGCCA |
| | TGGAAAACGGCAACATCCTGTCCGGCATCATCAACGGTAAAGTCAAAGGCGGCCTGACCGTT |
| | ATGATCAGCAGCATCCGCGCATTCCTGCCGGGTTCTTTGGTCGACGTACGTCCCGTTAAAGA |
| | CACTTCCCATTTTGAAGGCAAAGAGATCGAATTCAAAGTGATCAAACTGGACAAAAAACGCA |
| | ACAACGTCGTTGTTTCCCGCCGCGCCGTTTTGGAAGCCACTTTGGGTGAAGAACGCAAAGCC |
| | CTGCTGGAAAACCTGCAAGAAGGCTCCGTCATCAAAGGCATCGTCAAAAATATCACCGACTA |
| | CGGCGCATTCGTTGACCTGGGCGGCATCGACGGCCTGCTGCACATCACCGATTTGGCATGGC |
| | GTCGCGTGAAACACCCGAGCGAAGTCTTGGAAGTCGGTCAGGAAGTTGAAGCCAAAGTATTG |
| | AAATTCGACCAAGAAAAACAACGTGTTTCCTTGGGTATGAAACAACTGGGCGAAGATCCTTG |
| | GAGCGGTCTGACCCGCCGTTATCCGCAAGCCACCCGCCTGTTCGGCAAAGTATCCAACCTGA |
| | CCGACTACGGCGCATTCGTCGAAATCGAACAAGGCATCGAAGGTTTGGTACACGTCTCCGAA |
| | ATGGACTGGACCAACAAAAACGTACACCCGAGCAAAGTCGTACAACTGGGTGACGAAGTCGA |
| | AGTCATGATTTTGGAAATCGACGAAGGCCGCCGCCGTATCTCTTTGGGTATGAAACAATGCC |
| | AAGCCAATCCTTGGGAAGAATTTGCCGCCAACCACAACAAAGGAGACAAAATCTCCGGTGCG |
| | GTTAAATCCATTACCGATTTCGGCGTATTCGTCGGCCTGCCCGGCGGCATCGACGGTCTGGT |
| | TCACCTGTCCGACCTGTCTTGGACCGAATCCGGCGAAGAAGCCGTACGCAAATACAAAAAAG |
| | GAGAAGAAGTCGAAGCCGTCGTATTGGCAATCGATGTGGAAAAAGAACGCATCTCCTTGGGT |
| | ATCAAACAACTGGAAGGCGATCCTTTCGGCAACTTCATCAGCGTGAACGACAAAGGTTCTTT |
| | GGTTAAAGGTTCCGTGAAATCTGTTGATGCCAAAGGCGCTGTTATCGCCCTGTCTGACGAAG |
| | TAGAAGGCTACCTGCCTGCTTCCGAATTTGCAGCCGACCGCGTTGAAGACTTGACCACCAAA |
| | CTGAAAGAAGGCGATGAAGTTGAAGCCGTCATCGTTACCGTTGACCGCAAAAACCGCAGCAT |
| | CAAACTTTCCGTTAAAGCCAAAGATGCCAAAGAAAGCCGCGAAGCACTGAACTCCGTCAATG |
| | CCGCCGCCAATGCGAATGCCGGTACCACCAGCTTGGGCGACCTGCTGAAAGCCAAACTCTCC |
| | GGCGAACAAGAATAA-3′ (SEQ ID NO: 436) |
| N. gonorrhoeae | N-MSMENFAQLLEESFTLQEMNPGEVITAEVVAIDQNFVTVNAGLKSESLIDVAEFKNAQGE |
| S1 Protein | IEVKVGDFVTVTIESVENGFGETKLSREKAKRAADWIALEEAMENGNILSGIINGKVKGGLT |
| | VMISSIRAFLPGSLVDVRPVKDTSHFEGKEIEFKVIKLDKKRNNVVVSRRAVLEATLGEERK |
| | ALLENLQEGSVIKGIVKNITDYGAFVDLGGIDGLLHITDLAWRRVKHPSEVLEVGQEVEAKV |
| | LKFDQEKQRVSLGMKQLGEDPWSGLTRRYPQATRLFGKVSNLTDYGAFVEIEQGIEGLVHVS |
| | EMDWTNKNVHPSKVVQLGDEVEVMILEIDEGRRRISLGMKQCQANPWEEFAANHNKGDKISG |
| | AVKSITDFGVFVGLPGGIDGLVHLSDLSWTESGEEAVRKYKKGEEVEAVVLAIDVEKERISL |
| | GIKQLEGDPFGNFISVNDKGSLVKGSVKSVDAKGAVIALSDEVEGYLPASEFAADRVEDLTT |
| | KLKEGDEVEAVIVTVDRKNRSIKLSVKAKDAKESREALNSVNAAANANAGTTSLGDLLKAKL |
| | SGEQE-C (SEQ ID NO: 437) |
| N. gonorrhoeae | 5′-ATGGCACTGACCGTAGAACAAAAAGCACAAATCGTTAAAGATTTCCAACGTAAAGAAGG |
| S15 RNA | CGACACCGGCTCTTCTGAAGTACAAGTTGCCCTGTTGACTTTCCGCATCAACGATCTGACCC |
| | CCCACTTCAAAGCCAACCCCAAAGACCACCACAGCCGTCGCGGCCTGTTGAAAATGGTCAGC |
| | CAACGCCGTCGCCTGTTGGTCTATTTGCGCCGTACCCAGCCCGATACGTATCGCGCGTTGAT |
| | TACCCGCTTGGGTCTGCGTAAATAA-3′ (SEQ ID NO: 438) |
| N. gonorrhoeae | N-MALTVEQKAQIVKDFQRKEGDTGSSEVQVALLTFRINDLTPHFKANPKDHHSRRGLLKMV |
| S15 Protein | SQRRRLLVYLRRTQPDTYRALITRLGLRK-C (SEQ ID NO: 439) |
| B. pertussis | 5′-ATGGCCAATACCGCCCAAGCCCGCAAGCGCGCTCGCCAATCGGTCCAGCGCAACAAGCA |
| S20 RNA | CAACTCCAGCCTGCGCTCGATGCTGCGCACCGCCATCAAGCGCGTTCGCCAATCCATCGCCA |
| | CTGGCGATAAGGCTGCTGCTGGCGAAACGCTGCGTAAAGCCACGAGCGTGATTGACAGCGTG |
| | GCTGACAAGAACATCATCCACAAGAACAAGGCTGCTCGCCACAAGAGCCGCCTGGCTGCCGC |
| | CGTCAAGGCGCTGGCCTAA-3′ (SEQ ID NO: 440) |
| B. pertussis | N-MANTAQARKRARQSVQRNKHNSSLRSMLRTAIKRVRQSIATGDKAAAGETLRKATSVIDS |
| S20 Protein | VADKNIIHKNKAARHKSRLAAAVKALA-C (SEQ ID NO: 441) |
| B. pertussis | 5′-ATGCTGGTGATTCGTCTGGCCCGCGGTGGCTCGAAGAAGCGTCCGTTTTACAACCTGGT |
| S16 RNA | AGCTACCGATTCGCGCAATCGTCGCGATGGCCGTTTCGTCGAGCGCGTTGGCTTTTACAACC |
| | CGGTTGCCGCTGAAGGCACCGAGAATCTGCGCATCGCCCTGGACCGCGTGCAATACTGGACC |
| | GGCAACGGCGCGCTGCTGTCGCCCGCCGTCGAGCGCCTGGTCAAGGAATACTCGGCCAAGGT |
| | TTCGGCTGCTGCCTGA-3′ (SEQ ID NO: 442) |
| B. pertussis | N-MLVIRLARGGSKKRPFYNLVATDSRNRRDGRFVERVGFYNPVAAEGTENLRIALDRVQYW |
| S16 Protein | TGNGALLSPAVERLVKEYSAKVSAAA-C (SEQ ID NO: 443) |
| B. pertussis | 5′-ATGTCTTCCGTTTCCACCTCCGCCATCCTTGGCGGCGAAAACTTCGCCGACCTGTTCGC |
| S1 RNA | AGAAAGCCTCAAGAGCCAGGACATGAAGTCCGGCGAGGTCATCAGCGCAGAAGTCGTGCGCG |
| | TCGACCACAACTTCGTGGTCGTCAACGCCGGCCTGAAGTCCGAAGCGCTGATTCCCCTGGAA |
| | GAGTTCCTCAACGACCAGGGCGAACTCGAAGTTCAACCCGGCGACTTCGTCTCGGTGGCGAT |
| | CGATTCGCTGGAGAACGGCTACGGCGACACCATCCTGTCGCGCGACCGCGCCAAGCGTCTGT |
| | CGGCCTGGCTGCAACTGGAGCAGGCCCTCGAGAACGGCGAGCTGGTCACCGGCACGATCACC |
| | GGCAAGGTCAAGGGCGGCCTGACCGTCATGACCAACGGCATCCGCGCGTTCCTGCCCGGTTC |
| | GCTGGTCGACCTGCGTCCGGTCAAGGACACCACGCCGTACGAAGGCAAGACCCTCGAATTCA |
| | AGGTCATCAAGCTGGACCGCAAGCGCAACAACGTCGTGCTGTCGCGCCGCCAGGTGCTGGAA |
| | GCCAGCATGGGCGAAGAGCGCCAGAAGCTGCTCGAGACGCTGCACGAAGGCGCGGTGGTCAA |
| | GGGCGTGGTCAAGAACATCACCGACTACGGCGCGTTCGTCGACCTGGGCGGCATCGATGGCC |
| | TGCTGCACATCACCGACATGGCCTGGCGCCGTGTGCGTCACCCGTCCGAAGTCCTGCAAGTG |
| | GGTCAGGAAGTCGAAGCCAAGGTGCTCAAGTTCGACCAGGAAAAGAGCCGCGTCTCCCTGGG |
| | CGTCAAGCAGCTGGGCGAAGATCCGTGGGTGGGCCTGGCTCGCCGCTACCCGCAGGGCACCC |
| | GCCTGTTCGGCAAGGTCACCAACCTGACCGACTACGGCGCGTTCGTCGAAGTCGAAGCCGGC |
| | ATCGAAGGCCTGGTGCACGTGTCCGAAATGGACTGGACCAACAAGAACGTCGATCCGCGCAA |
| | GGTCGTGACCCTGGGCGAAGAAGTCGAAGTCATGGTCCTGGAAATCGACGAAGACCGTCGCC |
| | GCATTTCGCTGGGCATGAAGCAGTGCCGCCAGAACCCGTGGGAAGAGTTCGCCACCAACTTC |
| | AAGCGTGGTGACAAGGTCCGCGGCGCCATCAAGTCGATCACCGACTTCGGCGTGTTCGTCGG |
| | CCTGCCCGGCGGCATCGACGGCCTGGTCCATCTGTCCGACCTGTCGTGGACGGAATCGGGCG |
| | AGGAAGCCGTGCGCAACTTCAAGAAGGGCGACGAGCTGGAAGCCGTGGTGCTGGGCATCGAT |
| | ACCGAGAAAGAGCGCATCTCGCTGGGTATCAAGCAGCTCGAAGGCGACCCGTTCAACAACTT |
| | CGTTGCCACGCACGACAAGGGCGCCGTTGTTCCGGGCACCATCAAGTCGGTCGAGCCCAAGG |
| | GCGCCGTGATCACCCTGTCGGTGGATGTGGAAGGCTACCTGCGCGCCTCCGAGATCTCCTCG |
| | GGCCGCGTCGAAGACGCTACCACCGTGCTGAAGGCTGGCGAGAACATCGAAGCCATGATCGT |
| | CAACATCGACCGCAAGGCGCGTTCGATCCAGCTGTCGATCAAGGCCCGCGATAACGCCGAGA |
| | CGGCCGAGACCATCCAGCGCATGTCCGAGGCGAGCGCTTCGTCGGGTACGACGAACTTGGGC |
| | GCGCTGCTCAAGGCCAAGCTGGACCAACAGCGCAACGACGGTTGA-3′ |
| | (SEQ ID NO: 444) |
| B. pertussis | N-MSSVSTSAILGGENFADLFAESLKSQDMKSGEVISAEVVRVDHNFVVVNAGLKSEALIPL |
| S1 Protein | EEFLNDQGELEVQPGDFVSVAIDSLENGYGDTILSRDRAKRLSAWLQLEQALENGELVTGTI |
| | TGKVKGGLTVMTNGIRAFLPGSLVDLRPVKDTTPYEGKTLEFKVIKLDRKRNNVVLSRRQVL |
| | EASMGEERQKLLETLHEGAVVKGVVKNITDYGAFVDLGGIDGLLHITDMAWRRVRHPSEVLQ |
| | VGQEVEAKVLKFDQEKSRVSLGVKQLGEDPWVGLARRYPQGTRLFGKVTNLTDYGAFVEVEA |
| | GIEGLVHVSEMDWTNKNVDPRKVVTLGEEVEVMVLEIDEDRRRISLGMKQCRQNPWEEFATN |
| | FKRGDKVRGAIKSITDFGVFVGLPGGIDGLVHLSDLSWTESGEEAVRNFKKGDELEAVVLGI |
| | DTEKERISLGIKQLEGDPFNNFVATHDKGAVVPGTIKSVEPKGAVITLSVDVEGYLRASEIS |
| | SGRVEDATTVLKAGENIEAMIVNIDRKARSIQLSIKARDNAETAETIQRMSEASASSGTTNL |
| | GALLKAKLDQQRNDG-C(SEQ ID NO: 445) |
| B. pertussis | 5′-ATGTCTGTAGCTGACATCAAAAAATCCGAAATCGTCGCGCAATTCCAACGCGCTCAAGG |
| S15 RNA | CGATACCGGCTCCCCTGAAGTTCAGGTGGCACTGCTTACCGCTCGCATCAACGAACTGACCG |
| | GTCACTTCAAAGAACACATGAAGGACCACCACTCGCGCCGCGGCCTGCTGCGCATGGTCAGC |
| | CGTCGTCGCAAGCTGCTCGACTATCTCAAGGGCCGCAATCCCGATTCGTACCGCGCACTGAT |
| | CGAAAAACTCGGTCTGCGCAAGTGA-3′ (SEQ ID NO: 446) |
| B. pertussis | N-MSVADIKKSEIVAQFQRAQGDTGSPEVQVALLTARINELTGHFKEHMKDHHSRRGLLRMV |
| S15 Protein | SRRRKLLDYLKGRNPDSYRALIEKLGLRK-C(SEQ ID NO: 447) |
| A. faecalis | 5′-ATGGCTAATACCGCACAAGCACGCAAGCGCGCCCGCCAAGCAGTGGCTCGCAACAAACA |
| S20 RNA | CAACGCCAGCATCCGTTCCATGCTGCGTACCGCTATCAAGCGCGTTCGCCAGGCTATCGAAG |
| | CCGGTGACAAAACTGCTGCTAACGAAGTTTTCCGCAAAGCGACCAGCATCATTGATCGCGTT |
| | GCCGACAAGAACATCATTCACAAGAACAAGGCTGCCCGCCACAAGAGCCGCCTGTCTGCTGC |
| | TATCAAGGCCCTGGCCTGA-3′ (SEQ ID NO: 448) |
| A. faecalis | N-MANTAQARKRARQAVARNKHNASIRSMLRTAIKRVRQAIEAGDKTAANEVFRKATSIIDR |
| S20 Protein | VADKNIIHKNKAARHKSRLSAAIKALA-C(SEQ ID NO: 449) |
| A. faecalis | 5′-ATGGTGGTAATTCGCTTGGCCCGTGGTGGCTCCAAAAAGCGTCCTTTTTACAACGTAGT |
| S16 RNA | AGCCGCCGAGGCGAGCCAACGCCGTGATGGTCGCTTCATCGAACGTCTGGGTTTCTACAACC |
| | CCGTCGCTGGCGAAGGTCATGAAAACCTGCGTCTGCAAATGGACCGCGTTAAGCACTTCACC |
| | GACAACGGTGCTCAGGTTTCGCCTGCTGTGGCTCGCCTGTTGAAAGAATACTCGGCTAAGGT |
| | TGCTTCGGCTGCCTAA-3′ (SEQ ID NO: 450) |
| A. faecalis | N-MVVIRLARGGSKKRPFYNVVAAEASQRRDGRFIERLGFYNPVAGEGHENLRLQMDRVKHF |
| S16 Protein | TDNGAQVSPAVARLLKEYSAKVASA-C (SEQ ID NO: 451) |
| A. faecalis | 5′-ATGTCCACTAACCTTCACACAGACGCAACGGGCGGCGAAAGCTTTGCCGATTTGTTTGC |
| S1 RNA | AGAAAGCATTAAAAACCAAGACCTGAAAAGCGGCGAAGTTATCTCCGCCGAGGTTCTGCGTA |
| | TTGACCACAACTACGTTCTGGTCAATGCTGGCCTGAAGTCCGAAGCACTGATCCCTCTGGAA |
| | GAGTTCCTGAACGATCAGGGCGAGCTGGAAGTTCAAGCTGGTGACTTTGTTTCCGTGGCAAT |
| | CGACGCCTTTGAAAACGGCTACGGCGACACCATCCTGTCCCGCGACCGCGCCAAGCGTCTGT |
| | CGGCCTGGTTGTCCCTCGAGCAAGCGCTTGAGTCCGGCGAACTGGTCAACGGTACCATCACT |
| | GGTAAGGTCAAGGGCGGTCTGACTGTCATGACCAACGGCATCCGTGCATTCTTGCCCGGTTC |
| | GCTGGTTGATCTGCGTCCTGTCAAGGACACCACGCCATACGAAGGCAAGACCCTGGAATTCA |
| | AGGTTATCAAGCTCGATCGCAAGCGTAACAACGTCGTGTTGTCGCGTCGCGCTGTGCTGGAA |
| | GCCTCCATGGGCGAAGAGCGTCAGAAACTGCTGGAAACCCTGTCCGAAGGCGCTATCGTCAA |
| | AGGTATCGTCAAGAATATCACCGATTACGGTGCGTTCGTGGATCTGGGCGGCATCGACGGTC |
| | TGCTGCACATCACCGACATGGCATGGCGCCGTGTTCGTCACCCATCCGAAGTTCTGCAGGTG |
| | GGTCAGGAAATCGAAGCCAAGGTCCTCAAGTTCGATCAGGAAAAGAGCCGCGTCTCCCTGGG |
| | CGTCAAGCAGCTGGGCGAAGATCCATGGATCGGTCTGGCACGTCGCTACCCACAAAACACCC |
| | GTTTGTTCGGCAAGGTTACCAACCTGACCGACTACGGTGCATTTGTTGAAGTGGAAGACGGT |
| | ATCGAAGGTCTGGTTCACGTATCCGAAATGGATTGGACCAACAAGAACGTTGACCCACGCAA |
| | GGTTGTGACCTTGGGTGAAGAAGTCGAAGTCATGGTTCTGGAAATCGACGAAGATCGTCGTC |
| | GTATCTCCTTGGGCATGAAGCAGTGCCGTGCCAACCCATGGGAAGATTTCGCCATCAACTTC |
| | AAGCGCGGCGACAAGGTTCGCGGTGGCATCAAGTCCATCACCGACTTCGGCGTGTTTGTTGG |
| | TCTGCCAGGCGGCATCGACGGTCTGGTTCACCTGTCCGACCTGTCCTGGTCCGAGACTGGCG |
| | AAGAAGCCGTTCGCAACTTCAAGAAGGGCGACGAAGTTGACGCCGTGGTTCTGGGCATCGAC |
| | ACCGACAAAGAGCGCATTTCCCTGGGTATCAAACAGCTGGAAGGCGATCCGTTCAACAACTT |
| | CGTAGCTACCTACGACAAGGGTGCTGTAGTTAGCGGCGTCGTCAAGTCGGTAGAAGCCAAGG |
| | GTGCTGTTGTTACTCTGTCGCTGGACGTTGAAGGCTACCTGCGCGCCTCCGAGATCTCCTCG |
| | GGTCGTGTTGAAGATGCCACGACGGCTCTGAAAGAAGGTCAGGAAATCGAAACCATGATCTT |
| | GAGCGTGGATCGCAAGACCCGTTCGATTCAGTTGTCCATCAAGGCTCGTGATACCGCCGAAA |
| | CCGCTCAATCCATGGCCCGCCTGACCGAAGCCAGCGCTTCGTCCGGTACGACCAATCTGGGT |
| | GCTCTGCTGCGTGCCAAGCTGGACCAGCAGCAACGTGACGACGGTTAA-3′ |
| | (SEQ ID NO: 452) |
| A. faecalis | N-MSTNLHTDATGGESFADLFAESIKNQDLKSGEVISAEVLRIDHNYVLVNAGLKSEALIPL |
| S1 Protein | EEFLNDQGELEVQAGDFVSVAIDAFENGYGDTILSRDRAKRLSAWLSLEQALESGELVNGTI |
| | TGKVKGGLTVMTNGIRAFLPGSLVDLRPVKDTTPYEGKTLEFKVIKLDRKRNNVVLSRRAVL |
| | EASMGEERQKLLETLSEGAIVKGIVKNITDYGAFVDLGGIDGLLHITDMAWRRVRHPSEVLQ |
| | VGQEIEAKVLKFDQEKSRVSLGVKQLGEDPWIGLARRYPQNTRLFGKVTNLTDYGAFVEVED |
| | GIEGLVHVSEMDWTNKNVDPRKVVTLGEEVEVMVLEIDEDRRRISLGMKQCRANPWEDFAIN |
| | FKRGDKVRGGIKSITDFGVFVGLPGGIDGLVHLSDLSWSETGEEAVRNFKKGDEVDAVVLGI |
| | DTDKERISLGIKQLEGDPFNNFVATYDKGAVVSGVVKSVEAKGAVVTLSLDVEGYLRASEIS |
| | SGRVEDATTALKEGQEIETMILSVDRKTRSIQLSIKARDTAETAQSMARLTEASASSGTTNL |
| | GALLRAKLDQQQRDDG-C (SEQ ID NO: 453) |
| A. faecalis | 5′-ATGGCAGTTGCAGATATCAAAAAAGTCGATATCGTTTCCGAGTTTCAGCGTAAACAAGG |
| S15 RNA | CGATACAGGCTCCCCAGAAGTGCAAGTGGCTTTGCTGACCGCTCGCATCAACGAATTGACCG |
| | GCCACTTCAAGGCTCACAACAAGGATCACCACTCCCGTCGTGGTCTGTTGCGCATGGTTAGC |
| | CGTCGTCGCAAATTGCTGGATTACCTGAAAGGTCGTAATCCAGACGCTTACCGTGCTTTGAT |
| | CGAAAAACTCGGTCTGCGTAAGTGA-3′ (SEQ ID NO: 454) |
| A. faecalis | N-MAVADIKKVDIVSEFQRKQGDTGSPEVQVALLTARINELTGHFKAHNKDHHSRRGLLRMV |
| S15 Protein | SRRRKLLDYLKGRNPDAYRALIEKLGLRK-C(SEQ ID NO: 455) |
| V. cholerae | 5′-TTGGCAAATAACAAATCTGCTAAGAAGCGCGCTATCCAAGCTGAGAAACGTCGCCAGCA |
| S20 RNA | CAATGCTAGCCGTCGTTCTATGATGCGCACTTACATGAAGAAAACTGTTGCTGCAATCGCTG |
| | CTGGCGACAAAGAAGCTGCAACTGCTGCATTCGCTGTAGTTACACCAATCCTAGACCGCATG |
| | GCGACTAAAGGCCTTATTCACAAGAATAAAGCAGCTCGTCACAAGTCTCGCTTCTTTGCTGC |
| | TATCAACGCTCTGTAA-3′ (SEQ ID NO: 456) |
| V. cholerae | N-LANNKSAKKRAIQAEKRRQHNASRRSMMRTYMKKTVAAIAAGDKEAATAAFAVVTPILDR |
| S20 Protein | MATKGLIHKNKAARHKSRFFAAINAL-C (SEQ ID NO: 457) |
| V. cholerae | 5′-ATGGTAACCATTCGTTTGGCACGTCACGGCGCGAAAAAGCGTCCATTCTATCAAATCGT |
| S16 RNA | TGTAGCTGACAGCCGCAACTCAGCAACTGGCCGTTTCATCGAGAAAGTAGGTTTCTTTAACC |
| | CTACTGCTACTGGTCAAGAAGAAGGCCTGCGTCTAGACCTAGATCGCGTGAACCACTGGGTT |
| | TCACAAGGCGCATCTCTGTCTGATCGCGTAGCACAGCTAGTTAAAACCGCTCAAAAAGCGGC |
| | TTAA-3′ (SEQ ID NO: 458) |
| V. cholerae | N-MVTIRLARHGAKKRPFYQIVVADSRNSATGRFIEKVGFFNPTATGQEEGLRLDLDRVNHW |
| S16 Protein | VSQGASLSDRVAQLVKTAQKAA-C (SEQ ID NO: 459) |
| V. cholerae | 5′-ATGACTGAATCTTTTGCTCAACTCTTTGAAGAGTTTCTGAACGAGACCCAATTCCAACA |
| S1 RNA | AGGTACTATCGTTAAAGGTACTGTAGTAGCAATCGAGAACGGCTACGTTCTGGTTGATGCTG |
| | GCCTGAAGTCTGAGTCTGCTATCCCTGCTGAACAATTCAAGAACGCTGCTGGCGAACTAGAA |
| | GTTCAAGTCGGTTCTCAAGTAGACGTAGCTCTGGACGCGGTTGAAGATGGTTTCGGCGAAAC |
| | TCAACTTTCTCGTGAGAAAGCGAAGCGCCATGAAGCTTGGATCGTACTTGAAAAAGCTTACG |
| | AAGAAGCTGCAACTGTTATCGGTATCATTAACGGTAAAGTTAAAGGTGGTTTCACTGTTGAA |
| | CTGAACGGTATCCGTGCGTTCCTGCCAGGTTCTCTGGTTGACGTACGTCCAATCCGTGACAC |
| | TGCTCACTTAGAAAACAAAGAGCTAGAGTTCAAAGTTATCAAGCTAGACCAGAAGCGTAACA |
| | ACGTTGTTGTTTCTCGTCGTGCAGTTATCGAATCTGAAAGCAGCGTAGAGCGTGATGAACTG |
| | CTTGAAACTCTGCAAGAAGGTACTGAAGTTAAAGGTATCGTTAAGAACCTGACTGACTACGG |
| | TGCGTTCGTTGATCTGGGCGGCGTTGACGGTCTGCTACACATCACTGACATGGCTTGGAAGC |
| | GCGTTAAGCATCCATCAGAAATCGTTAACGTTGGTGACGAGATCCTAGTTAAAGTACTGAAG |
| | TTCGATCGTGATCGTACTCGCGTATCTCTAGGTCTGAAACAGCTAGGCGAAGATCCATGGGT |
| | AGCAATCGCTAAGCGTTACCCAGAAGGTCACAAACTGTCTGGCCGTGTAACTAACCTGACTG |
| | ACTACGGCTGCTTCGTTGAAATCGAAGAAGGCGTTGAAGGTCTAGTACACGTTTCTGAAATG |
| | GACTGGACGAACAAGAACATCCACCCATCTAAAGTTGTTAATGTTGGCGACGAAGTTGAGGT |
| | TATGGTTCTGGATATCGACGAAGAGCGTCGTCGTATCTCTCTAGGCCTGAAACAGTGTAAAG |
| | CTAACCCATGGCAATCATTCGCTGAAGCGCAAGCTAAAGGCGACAAAGTAACTGGTAAGATC |
| | AAGTCTATCACTGACTTTGGTATCTTCATCGGTCTAGAAGGCGGTATCGACGGTCTGGTTCA |
| | CCTGTCTGACATCTCTTGGAACGTACCAGGAGAAGAAGCTGTTCGTGAATTCAAGAAAGGCG |
| | ACGAAATCTCTGCAGTTGTTCTAGCAGTAGACGCTGAGCGTGAGCGTATTTCTCTGGGCATC |
| | AAGCAAATGGAAAACGATCCATTCAACGCTTATGTTTCAGACAACAAGAAAGGTGCTCTGGT |
| | TAACGGTACTGTAACTGCAGTTGACGCGAAAGGCGCAACCATCGAGCTAGAAGACGGCGTTG |
| | AAGGTTACATCCGCGCTTCTGAAGTATCACGTGACCGTATCGAAGATGCATCACTGATCCTG |
| | AACGTTGGTGACAAAGTTGAAGCGAAATTTACTGGTGTTGACCGTAAAAACCGCGTAATCAA |
| | CCTGTCTATCAAAGCGAAAGATGAAGCTGAAGAGCAAGAAGTAATGGCAACTCTGAACAAGC |
| | AAGATGAAGCTGCGTTCGGTAATGCTATGGCTGACGCTTTCAAAGCAGCGAAAGGCGAATA |
| | A-3′ (SEQ ID NO: 460) |
| V. cholerae | N-MTESFAQLFEEFLNETQFQQGTIVKGTVVAIENGYVLVDAGLKSESAIPAEQFKNAAGEL |
| S1 Protein | EVQVGSQVDVALDAVEDGFGETQLSREKAKRHEAWIVLEKAYEEAATVIGIINGKVKGGFTV |
| | ELNGIRAFLPGSLVDVRPIRDTAHLENKELEFKVIKLDQKRNNVVVSRRAVIESESSVERDE |
| | LLETLQEGTEVKGIVKNLTDYGAFVDLGGVDGLLHITDMAWKRVKHPSEIVNVGDEILVKVL |
| | KFDRDRTRVSLGLKQLGEDPWVAIAKRYPEGHKLSGRVTNLTDYGCFVEIEEGVEGLVHVSE |
| | MDWTNKNIHPSKVVNVGDEVEVMVLDIDEERRRISLGLKQCKANPWQSFAEAQAKGDKVTGK |
| | IKSITDFGIFTGLEGGIDGLVHLSDISWNVPGEEAVREFKKGDEISAVVLAVDAERERISLG |
| | IKQMENDPFNAYVSDNKKGALVNGTVTAVDAKGATIELEDGVEGYIRASEVSRDRIEDASLI |
| | LNVGDKVEAKFTGVDRKNRVINLSIKAKDEAEEQEVMATLNKQDEAAFGNAMADAFKAAKG |
| | E-C (SEQ ID NO: 461) |
| V. cholerae | 5′-ATGTCTCTGAATGCAGAAACTAAAGCAGCAATCGTTGCTGAATATGCACGTTGCGAAAA |
| S15 RNA | TGACACAGGTTCACCAGAAGTACAGATCGCTCTACTGACTGCTTCTATCAACCACCTGCAAG |
| | GTCACTTCCAAGCACACAAAGGCGATCACCACAGCCGTCGTGGTCTGCTACGTATGGTTTCA |
| | AGCCGTCGTAAACTGCTGGACTACCTGAAAGGTAAAGATCTGTCTCGTTACCAAGATCTGAT |
| | CAAACGTCTAGGCCTGCGTCGTTAA-3′ (SEQ ID NO: 462) |
| V. cholerae | N-MSLNAETKAAIVAEYARCENDTGSPEVQIALLTASINHLQGHFQAHKGDHHSRRGLLRMV |
| S15 Protein | SSRRKLLDYLKGKDLSRYQDLIKRLGLRR-C (SEQ ID NO: 463) |
| A. baumannii | 5′-GTGGCAAACTCTGCTCAAGCTAAAAAACGTGCGCGCCAAAACGTTAAAGCGCGTAAACA |
| S20 RNA | CAACGCAAGCTTGCGTTCTATGGTTCGTACTTACATCAAACGTACTTTAAGTGCAATCGCTG |
| | GTGGTGATTATGCTGTTGCTACAGAAGCTTACAAAAAAGCTGTTCCTGTAATCGACCGCATG |
| | GCTGATAAAGGCATCATCCACAAAAATAAAGCTGCTCGTCATAAGAGCCGTTTAAATGCTCA |
| | AGTTAAAGCTTTAGCTAACTAA-3′ (SEQ ID NO: 464) |
| A. baumannii | N-VANSAQAKKRARQNVKARKHNASLRSMVRTYIKRTLSAIAGGDYAVATEAYKKAVPVIDR |
| S20 Protein | MADKGIIHKNKAARHKSRLNAQVKALAN-C (SEQ ID NO: 465) |
| A. baumannii | 5′-ATGGTTGTTATTCGTTTAGCACGTGGCGGCGCAAAAAAACGTCCATTCTATCAAATCGT |
| S16 RNA | TGTGACTGATAGCCGCAATGCACGTGATGGTCGTTTCATCGAGCGTATCGGTTTCTTTAACC |
| | CAACTGCACAAGGTCAAGCAGAAAAACTTCGTTTAGACGCAGACCGTTTTGCTCACTGGGTT |
| | TCTCAAGGTGCTCAACCTTCTGAACGTGTTGCTTCTTTGGCTGCTCAAGCTAAAAAAGCTAC |
| | TGCATAA-3′ (SEQ ID NO: 466) |
| A. baumannii | N-MVVIRLARGGAKKRPFYQIVVTDSRNARDGRFIERIGFFNPTAQGQAEKLRLDADRFAHW |
| S16 Protein | VSQGAQPSERVASLAAQAKKATA-C (SEQ ID NO: 467) |
| A. baumannii | 5′-ATGACCGAATCTTTTGCAGCCCTCTTTGAAGAAAGTGAATTAAACCTCAACGTTGAAAA |
| S1 RNA | GGGTGCAGTCATCCAAGGTGTTGTTGTAAACATCGATAGCGACTGGGTTACTGTTGACACTG |
| | GCCTTAAATCAGAAGGCATTGTTGACCGTGCTGAATTTTTAAATGAACAACGTGAACTTGAA |
| | GTTCAGGTTGGTGACACTGTTGACGTAGTTGTTGAAGCTCTTGACAACGGTATGGGTCAAAC |
| | AGTTTTATCACGTGAAAAAGCTAAACGTGCTGAAACTTGGACTAAACTTGAAAAAATCTTTG |
| | AAGATGGCGAAATCGTTACTGGTGTTATCTCTGGTAAAGTTAAAGGCGGTTTCACTGTTGAC |
| | ATCGGTCCTGTTCGTGCGTTCTTACCAGGTTCATTAGTTGACACTCGTCCTATCCGTGACAC |
| | TACTCACCTTGAAGGTAAAGAGTTAGAGTTTAAAGTAATCAAACTTGATGCTAAACGTAACA |
| | ACGTTGTTGTATCTCGTCGTGCTGTTATGGAAGCTGAATCTTCTGCTGACCGTGAAGCATTA |
| | CTTGCTCAACTTGAAGAAGGTCAAACAGTTACAGGTACTATCAAGAACCTTACTGATTACGG |
| | TGCATTCGTTGATCTTGGCGGTATTGATGGTCTTCTTCATATCACAGATATGGCTTGGAAGC |
| | GTATCAAGCACCCTTCAGAAGTTGTTGAAGTTGGTCAAGAAGTTACTGTTAAAGTACTTAAA |
| | TTTGACCGTGAACGTAACCGCGTATCTTTAGGCCTTAAACAATTAGGCGAAGATCCATGGTT |
| | AGCGATCATGAGCCGTTACCCTAAAGGTTCTATCGTTAAAGCACGTGTTACTAACTTAACTG |
| | ACTACGGTTGTTTCGCTGAAATCGCTGAAGGCGTTGAAGGTTTAGTACACGTTTCTGAAATG |
| | GACCACACTAACAAAAACATCCACCCATCTAAAGTTGTTCAGATCGGTGACGAAGTTGATGT |
| | TATGGTTCTTGAAGTTGACGAAGAACGTCGTCGTATCAGCCTTGGTATCAAACAAACTCGTG |
| | CTAACCCATGGGAAGAGTTTGCTAAGTCTCATGAGAAAGGCGAAAAAGTTTCAGGCACAATC |
| | AAGTCTATCACTGACTTTGGTATCTTCATTGGTTTAAATGGCGGTATCGACGGTCTAGTTCA |
| | CTTGTCTGATATTTCTTGGAACGAACAAGGCGAAGAAGCTATCCGTCGTTACAAGAAAGGTG |
| | ACACTGTTGAAGCAGTTATCTTGTCTGTAGACGCTGAAGGTAACCGTATCAGCCTTGGTATC |
| | AAGCAATTGAACAGCGATCCGTTCAATGATTTCTTAGCTGCTAACGAACGTGGTGCTTTAGT |
| | TAAAGGTACTGTGACTGCAGTTGATGCTCGTGGCGCAACTGTTAAGTTAGCTGACGAAGTAG |
| | AAGCTACTCTTAAAGCTTCTGAAATCAACCGTGACCGCGTTGAAGATGCAACTAAATTCTTA |
| | GAAGTTGGTCAAGAAGTTGAAGCTAAAATCATCAACGTTGATCGTAAATCTCGCTCTATCAA |
| | CTTGTCTATCAAAGCGAAAGACGAAGCTGAAGAGAAAGAAGCAGTAGCTAACTTACGTACAG |
| | CATCAGCTTCTCAAGAAAATGGTCCTAAGACTATTGGTGACTTGATCAAAGCGCAAATGAAG |
| | TAA-3′ (SEQ ID NO: 468) |
| A. bauniannii | N-MTESFAALFEESELNLNVEKGAVIQGVVVNIDSDWVTVDTGLKSEGIVDRAEFLNEQREL |
| S1 Protein | EVQVGDTVDVVVEALDNGMGQTVLSREKAKRAETWTKLEKIFEDGEIVTGVISGKVKGGFTV |
| | DIGPVRAFLPGSLVDTRPIRDTTHLEGKELEFKVIKLDAKRNNVVVSRRAVMEAESSADREA |
| | LLAQLEEGQTVTGTIKNLTDYGAFVDLGGIDGLLHITDMAWKRIKHPSEVVEVGQEVTVKVL |
| | KFDRERNRVSLGLKQLGEDPWLAIMSRYPKGSIVKARVTNLTDYGCFAEIAEGVEGLVHVSE |
| | MDHTNKNIHPSKVVQIGDEVDVMVLEVDEERRRISLGIKQTRANPWEEFAKSHEKGEKVSGT |
| | IKSITDFGIFTGLNGGIDGLVHLSDISWNEQGEEAIRRYKKGDTVEAVILSVDAEGNRISLG |
| | IKQLNSDPFNDFLAANERGALVKGTVTAVDARGATVKLADEVEATLKASEINRDRVEDATKF |
| | LEVGQEVEAKIINVDRKSRSINLSIKAKDEAEEKEAVANLRTASASQENGPKTIGDLIKAQM |
| | K-C (SEQ ID NO: 469) |
| A. bauniannii | 5′-ATGGCTTTAACTAATGCAGACCGCGCAGAGATCATTGCTAAATTTGCTCGCGCTGAAAA |
| S15 RNA | CGACACTGGTTCACCAGAAGTACAAGTAGCTTTATTGACTGCTCAAATCAATGATTTACAAG |
| | GTCACTTTAAAGCTCACAAACACGACCACCATAGCCGTCGCGGTTTGATCCGTATGGTTAAC |
| | CAACGTCGTAAATTACTTGACTACTTAAATGGTAAAGACCACGAGCGTTACACTGCTTTGAT |
| | CGGTGCTTTAGGTCTACGTCGTTAA-3′ (SEQ ID NO: 470) |
| A. bauniannii | N-MALTNADRAEIIAKFARAENDTGSPEVQVALLTAQINDLQGHFKAHKHDHHSRRGLIRMV |
| S15 Protein | NQRRKLLDYLNGKDHERYTALIGALGLRR-C(SEQ ID NO: 471) |
| P. aeruginosa | 5′-GTGGCCAACACACCTTCCGCCAAAAAACGCGCCAAACAGGCTGAGAAGCGTCGCAGCCA |
| S20 RNA | CAACGCCAGCCTGCGCTCCATGGTGCGCACCTACATCAAGAACGTCGTGAAAGCCATCGACG |
| | CCAAGGACCTGGAAAAAGCCCAGGCCGCCTTCACCGCCGCTGTACCGGTGATCGACCGCATG |
| | GCTGACAAAGGCATCATCCACAAGAACAAGGCTGCTCGTCATAAGAGCCGTCTGAGCGGCCA |
| | CATCAAGGCCCTCAGCACCGCTGCCGCCTAA-3′ (SEQ ID NO: 472) |
| P. aeruginosa | N-VANTPSAKKRAKQAEKRRSHNASLRSMVRTYIKNVVKAIDAKDLEKAQAAFTAAVPVIDR |
| S20 Protein | MADKGIIHKNKAARHKSRLSGHIKALSTAAA-C (SEQ ID NO: 473) |
| P. aeruginosa | 5′-ATGGTAACCATCCGTCTTGCTCGTGGCGGCTCCAAAAAGCGCCCCTTCTACCACCTGAC |
| S16 RNA | CGTGACCAACAGCCGCAATGCGCGCGATGGTCGCTTCGTCGAGCGCATCGGTTTCTTCAACC |
| | CGGTTGCGACTGGTGGCGAAGTGCGTCTGTCCGTCGACCAGGAGCGTGCTACCTACTGGCTC |
| | GGCCAGGGTGCACAGCCGTCTGAGCGCGTTGCTCAGCTGCTCAAGGACGCTGCCAAGGCAAA |
| | CGCCTAA-3′ (SEQ ID NO: 474) |
| P. aeruginosa | N-MVTIRLARGGSKKRPFYHLTVTNSRNARDGRFVERIGFFNPVATGGEVRLSVDQERATYW |
| S16 Protein | LGQGAQPSERVAQLLKDAAKANA-C (SEQ ID NO: 475) |
| P. aeruginosa | 5′-ATGAGCGAAAGCTTCGCAGAACTCTTTGAAGAAAGTCTGAAATCCCTCGACATGCAGCC |
| S1 RNA | GGGTGCCATCATCACCGGCATCGTGGTCGACATCGATGGTGACTGGGTCACCGTCCATGCCG |
| | GTCTGAAATCCGAGGGCGTCATCCCGGTCGAGCAGTTCTACAACGAACAGGGCGAGCTGACC |
| | ATCAAGGTGGGTGACGAAGTCCACGTCGCACTGGACGCGGTAGAAGACGGCTTTGGCGAGAC |
| | CAAGCTGTCCCGCGAGAAAGCCAAGCGCGCCGAGAGCTGGATTGTTCTGGAAGCGGCTTTCG |
| | CTGCCGACGAAGTGGTCAAGGGCGTCATCAACGGCAAGGTCAAGGGCGGTTTCACCGTCGAC |
| | GTCAACGGCATCCGCGCGTTCCTGCCGGGTTCTCTGGTCGACGTTCGTCCGGTTCGCGACAC |
| | CACCCACCTGGAAGGCAAAGAGCTCGAGTTCAAGGTCATCAAGCTCGACCAGAAGCGCAACA |
| | ACGTTGTCGTTTCCCGCCGCAGCGTCCTGGAAGCCGAGAACAGCGCCGAGCGTGAAGCTCTG |
| | CTGGAATCGCTGCAGGAAGGCCAGCAGGTCAAAGGTATCGTCAAGAACCTCACCGACTACGG |
| | CGCATTCGTGGACCTGGGCGGCGTAGACGGCCTGCTACACATCACCGACATGGCCTGGAAGC |
| | GCATCAAGCATCCGTCCGAGATCGTCAACGTTGGCGACGAGATCGACGTCAAGGTCCTGAAG |
| | TTCGACCGCGAGCGCAACCGTGTATCCCTGGGCCTGAAGCAACTGGGCGAAGACCCGTGGGT |
| | TGCCATCAAGGCGCGTTACCCGGAAGGTACCCGCGTCATGGCCCGCGTCACCAACCTCACCG |
| | ACTACGGCTGCTTCGCCGAGCTGGAAGAGGGCGTGGAAGGCCTGGTACACGTCTCCGAAATG |
| | GACTGGACCAACAAGAACATCCATCCGTCGAAAGTCGTCCAGGTTGGCGATGAAGTGGAAGT |
| | TCAGGTTCTGGACATCGACGAAGAGCGTCGTCGTATCTCCCTGGGTATCAAGCAGTGCAAAT |
| | CCAACCCGTGGGAAGACTTCTCCAGCCAGTTCAACAAGGGTGACCGTATCTCCGGTACCATC |
| | AAGTCGATCACCGACTTCGGTATCTTCATCGGTCTGGACGGCGGCATCGACGGCCTGGTCCA |
| | CCTGTCCGACATCTCCTGGAACGAAGTCGGCGAAGAAGCCGTACGTCGCTTCAAGAAGGGCG |
| | ACGAGCTGGAAACCGTCATCCTGTCGGTCGATCCGGAGCGCGAGCGCATCTCCCTGGGCATC |
| | AAGCAGCTGGAAGACGATCCGTTCTCCAACTACGCGTCCCTGCACGAGAAAGGCAGCATCGT |
| | CCGCGGTACCGTGAAGGAAGTCGACGCCAAGGGCGCTGTCATCAGCCTGGGCGACGACATCG |
| | AAGGTATCCTGAAGGCTTCCGAAATCAGCCGTGACCGCGTCGAAGACGCGCGCAACGTCCTG |
| | AAGGAAGGCGAGGAAGTCGAAGCCAAGATCATCAGCATCGACCGCAAGAGCCGCGTCATCAG |
| | CCTCTCCGTCAAGTCCAAGGACGTCGACGACGAGAAGGACGCAATGAAAGAACTGCGTAAGC |
| | AGGAAGTAGAAAGCGCTGGTCCGACCACCATCGGTGATCTGATCCGTGCTCAGATGGAGAAT |
| | CAGGGCTAA-3′ (SEQ ID NO: 476) |
| P. aeruginosa | N-MSESFAELFEESLKSLDMQPGAIITGIVVDIDGDWVTVHAGLKSEGVIPVEQFYNEQGEL |
| S1 Protein | TIKVGDEVHVALDAVEDGFGETKLSREKAKRAESWIVLEAAFAADEVVKGVINGKVKGGFTV |
| | DVNGIRAFLPGSLVDVRPVRDTTHLEGKELEFKVIKLDQKRNNVVVSRRSVLEAENSAEREA |
| | LLESLQEGQQVKGIVKNLTDYGAFVDLGGVDGLLHITDMAWKRIKHPSEIVNVGDEIDVKVL |
| | KFDRERNRVSLGLKQLGEDPWVAIKARYPEGTRVMARVTNLTDYGCFAELEEGVEGLVHVSE |
| | MDWTNKNIHPSKVVQVGDEVEVQVLDIDEERRRISLGIKQCKSNPWEDFSSQFNKGDRISGT |
| | IKSITDFGIFIGLDGGIDGLVHLSDISWNEVGEEAVRRFKKGDELETVILSVDPERERISLG |
| | IKQLEDDPFSNYASLHEKGSIVRGTVKEVDAKGAVISLGDDIEGILKASEISRDRVEDARNV |
| | LKEGEEVEAKIISIDRKSRVISLSVKSKDVDDEKDAMKELRKQEVESAGPTTIGDLIRAQME |
| | NQG-C (SEQ ID NO: 477) |
| P. aeruginosa | 5′-ATGGCACTGAGCGTTGAAGAAAAAGCGCAGATCGTTAACGAATACAAGCAAGCTGAAGG |
| S15 RNA | CGACACCGGTTCCCCGGAAGTGCAGGTAGCCCTGCTGTCCGCCAACATCAACAAGCTGCAGG |
| | ATCACTTCAAGGCCAACGGCAAGGATCACCATTCCCGCCGTGGTCTGATCCGTATGGTTAAC |
| | CAGCGCCGTAAGCTGCTGGACTACCTGAAGGGCAAAGACGTGTCTCGCTACACTGCCCTGAT |
| | CGGCCGTCTGGGTCTGCGTCGCTAA-3′ (SEQ ID NO: 478) |
| P. aeruginosa | N-MALSVEEKAQIVNEYKQAEGDTGSPEVQVALLSANINKLQDHFKANGKDHHSRRGLIRMV |
| S15 Protein | NQRRKLLDYLKGKDVSRYTALIGRLGLRR-C (SEQ ID NO: 479) |

[0192] It is contemplated that variant or mutant forms of the sequences presented herein can also be employed in making and using nucleotide and/or protein constructs of the disclosure. Accordingly, the exemplary sequences presented herein can be modified to contain one, two, three, four, five or more variant residues, as compared to those disclosed herein, and still remain within the scope of the contemplated disclosure. Similarly, it is contemplated that a sequence at least 80% identical, at least 90% identical, at least 95% identical, at least 97% identical, at least 98% identical or at least 99% identical to one or more of the specific sequences recited herein can be employed in the compositions and methods of the instant disclosure.

### REFERENCES

[0193] 1. Chubukov, V., Gerosa, L., Kochanowski, K. & Sauer, U. Coordination of microbial metabolism. Nat Rev Microbiol 12, 327-40 (2014).
[0194] 2. de Jong, H., Geiselmann, J. & Ropers, D. Resource Reallocation in Bacteria by Reengineering the Gene Expression Machinery. Trends Microbiol 25, 480-493 (2017).
[0195] 3. Kaczanowska, M. & Ryden-Aulin, M. Ribosome biogenesis and the translation process in Escherichia coli. Microbiol Mol Biol Rev 71, 477-94 (2007).
[0196] 4. Rackham, O. & Chin, J. W. A network of orthogonal ribosome x mRNA pairs. Nat Chem Biol 1, 159-66 (2005).
[0197] 5. Wang, K., Neumann, H., Peak-Chew, S. Y. & Chin, J. W. Evolved orthogonal ribosomes enhance the efficiency of synthetic genetic code expansion. Nature Biotechnology 25, 770 (2007).
[0198] 6. Neumann, H., Wang, K., Davis, L., Garcia-Alai, M. & Chin, J. W. Encoding multiple unnatural amino acids via evolution of a quadruplet-decoding ribosome. Nature 464, 441 (2010).
[0199] 7. Schmied, W. H. et al. Controlling orthogonal ribosome subunit interactions enables evolution of new function. Nature 564, 444-448 (2018).
[0200] 8. Orelle, C. et al. Protein synthesis by ribosomes with tethered subunits. Nature 524, 119-24 (2015).
[0201] 9. Fried, S. D., Schmied, W. H., Uttamapinant, C. & Chin, J. W. Ribosome Subunit Stapling for Orthogonal Translation in E. coli. Angew Chem Int Ed Engl 54, 12791-4 (2015).
[0202] 10. Filipovska, A. & Rackham, O. Specialization from synthesis: how ribosome diversity can customize protein function. FEBS Lett 587, 1189-97 (2013).
[0203] 11. Kurylo, C. M. et al. Endogenous rRNA Sequence Variation Can Regulate Stress Response Gene Expression and Phenotype. Cell Rep 25, 236-248.e6 (2018).
[0204] 12. Kim, H.-L. et al. Heterogeneous rRNAs are differentially expressed during the morphological development of Streptomyces coelicolor. FEMS Microbiology Letters 275, 146-152 (2019).
[0205] 13. Deusser, E. & Wittmann, H.-G. Biological Sciences: Ribosomal Proteins: Variation of the Protein Composition in Escherichia coli Ribosomes as Function of Growth Rate. Nature 238, 269-270 (2019).
[0206] 14. Moll, I., Resch, A. & Blasi, U. Discrimination of 5′-terminal start codons by translation initiation factor 3 is mediated by ribosomal protein S1. FEBS Lett 436, 213-7 (1998).
[0207] 15. Kitahara, K. & Miyazaki, K. Revisiting bacterial phylogeny: Natural and experimental evidence for horizontal gene transfer of 16S rRNA. Mob Genet Elements 3, e24210 (2013).
[0208] 16. Kitahara, K., Yasutake, Y. & Miyazaki, K. Mutational robustness of 16S ribosomal RNA, shown by experimental horizontal gene transfer in Escherichia coli. Proc Natl Acad Sci USA 109, 19220-5 (2012).
[0209] 17. Asai, T., Zaporojets, D., Squires, C. & Squires, C. L. An Escherichia coli strain with all chromosomal rRNA operons inactivated: complete exchange of rRNA genes between bacteria. Proc Natl Acad Sci USA 96, 1971-6 (1999).
[0210] 18. Gyorfy, Z. et al. Engineered ribosomal RNA operon copy-number variants of E. coli reveal the evolutionary trade-offs shaping rRNA operon number. Nucleic Acids Research 43, 1783-1794 (2019).
[0211] 19. Shi, X., Chiu, K., Ghosh, S. & Joseph, S. Bases in 16S rRNA Important for Subunit Association, tRNA binding, and Translocation. Biochemistry 48, 6772-82 (2009).
[0212] 20. Gutgsell, N. S. & Jain, C. Role of precursor sequences in the ordered maturation of E. coli 23S ribosomal RNA. (2012).
[0213] 21. Kitahara, K. & Suzuki, T. The ordered transcription of RNA domains is not essential for ribosome biogenesis in Escherichia coli. Mol Cell 34, 760-6 (2009).
[0214] 22. Sahu, B., Khade, P. K. & Joseph, S. Functional Replacement of Two Highly Conserved Tetraloops in the Bacterial Ribosome. (2012).
[0215] 23. Mylvaganam, S. & Dennis, P. P. Sequence heterogeneity between the two genes encoding 16S rRNA from the halophilic archaebacterium Haloarcula marismortui. Genetics 130, 399-410 (1992).
[0216] 24. Ueda, K., Seki, T., Kudo, T., Yoshida, T. & Kataoka, M. Two Distinct Mechanisms Cause Heterogeneity of 16S rRNA. (1999).
[0217] 25. Yap, W. H., Zhang, Z. & Wang, Y. Distinct Types of rRNA Operons Exist in the Genome of the Actinomycete Thermomonospora chromogena and Evidence for Horizontal Transfer of an Entire rRNA Operon. (1999).
[0218] 26. Tian, R. M., Cai, L., Zhang, W. P., Cao, H. L. & Qian, P. Y. Rare Events of Intragenus and Intraspecies Horizontal Transfer of the 16S rRNA Gene. in Genome Biol Evol, Vol. 7 2310-20 (2015).
[0219] 27. Acinas, S. G., Marcelino, L. A., Klepac-Ceraj, V. & Polz, M. F. Divergence and Redundancy of 16S rRNA Sequences in Genomes with Multiple rm Operons. (2004).
[0220] 28. Prossliner, T., Skovbo Winther, K., Sorensen, M. A. & Gerdes, K. Ribosome Hibernation. Annu Rev Genet 52, 321-348 (2018).
[0221] 29. Byrgazov, K., Vesper, O. & Moll, I. Ribosome heterogeneity: another level of complexity in bacterial translation regulation. Curr Opin Microbiol 16, 133-9 (2013).
[0222] 30. Asai, T. et al. Construction and Initial Characterization of Escherichia coli Strains with Few or No Intact Chromosomal rRNA Operons. in J Bacteriol, Vol. 181 3803-9 (1999).
[0223] 31. Blattner, F. R. et al. The complete genome sequence of Escherichia coli K-12. Science 277, 1453-62 (1997).
[0224] 32. Mizoguchi, H., Tanaka-Masuda, K. & Mon, H. A simple method for multiple modification of the Escherichia coli K-12 chromosome. Biosci Biotechnol Biochem 71, 2905-11(2007).
[0225] 33. Li, X. T., Thomason, L. C., Sawitzke, J. A., Costantino, N. & Court, D. L. Positive and negative selection using the tetA-sacB cassette: recombineering and P1 transduction in Escherichia coli. Nucleic Acids Res 41, e204 (2013).
[0226] 34. Pedelacq, J. D., Cabantous, S., Tran, T., Terwilliger, T. C. & Waldo, G. S. Engineering and characterization of a superfolder green fluorescent protein. Nat Biotechnol 24, 79-88 (2006).
[0227] 35. Valdar, W. S. Scoring residue conservation. Proteins 48, 227-41 (2002).
[0228] 36. Deutscher, M. P. & Biology, B. M. Chapter 9 Maturation and Degradation of Ribosomal RNA in Bacteria. Progress in Molecular Biology and Translational Science 85, 369-391 (2019).
[0229] 37. Shajani, Z., Sykes, M. T. & Williamson, J. R. Assembly of bacterial ribosomes. Annu Rev Biochem 80, 501-26 (2011).
[0230] 38. Traxler, M. F. et al. The global, ppGpp-mediated stringent response to amino acid starvation in Escherichia coli. Mol Microbiol 68, 1128-48 (2008).
[0231] 39. Dunstan, M. S., Guhathakurta, D., Draper, D. E. & Conn, G. L. Coevolution of protein and RNA structures within a highly conserved ribosomal domain. Chem Biol 12, 201-6 (2005).
[0232] 40. Brandman, R., Brandman, Y. & Pande, V. S. Sequence coevolution between RNA and protein characterized by mutual information between residue triplets. PLoS One 7, e30022 (2012).
[0233] 41. Peterson, J. & Phillips, G. J. New pSC101-derivative cloning vectors with elevated copy numbers. Plasmid 59, 193-201 (2008).
[0234] 42. Darlington, A. P. S., Kim, J., Jimenez, J. I. & Bates, D. G. Dynamic allocation of orthogonal ribosomes facilitates uncoupling of co-expressed genes. Nature Communications 9, 1-12 (2018).
[0235] 43. Madeira, F. et al. The EMBL-EBI search and sequence analysis tools APIs in 2019. Nucleic Acids Res 47, W636-w641 (2019).
[0236] 44. Noeske, J. et al. High-resolution structure of the Escherichia coli ribosome. Nat Struct Mol Biol 22, 336-41 (2015).
[0237] 45. Shoji, S., Dambacher, C. M., Shajani, Z., Williamson, J. R. & Schultz, P. G. Systematic chromosomal deletion of bacterial ribosomal protein genes. J Mol Biol 413, 751-61 (2011).
[0238] 46. Dabbs, E. R. Selection for Escherichia coli mutants with proteins missing from the ribosome. J Bacteriol 140, 734-7 (1979).
[0239] 47. Hubbard, B. P. et al. Continuous directed evolution of DNA-binding proteins to improve TALEN specificity. Nature methods 12, 939 (2015).
[0240] 48. Carlson, J. C., Badran, A. H., Guggiana-Nilo, D. A. & Liu, D. R. Negative selection and stringency modulation in phage-assisted continuous evolution. Nat Chem Biol 10, 216-22 (2014).
[0241] 49. Asai, T. et al. Construction and initial characterization of Escherichia coli strains with few or no intact chromosomal rRNA operons. Journal of bacteriology 181, 3803-3809 (1999).
[0242] 50. Asai, T., Zaporojets, D., Squires, C. & Squires, C. L. An Escherichia coli strain with all chromosomal rRNA operons inactivated: complete exchange of rRNA genes between bacteria. Proceedings of the National Academy of Sciences 96, 1971-1976 (1999).
[0243] 51. Sprouffske, K. Using Growthcurver. (Jul. 30, 2018).
[0244] 52. Parks, D. H. et al. A standardized bacterial taxonomy based on genome phylogeny substantially revises the tree of life. Nature Biotechnology 36, 996-1004 (2018).
[0245] 53. Paradis, E. & Schliep, K. ape 5.0: an environment for modern phylogenetics and evolutionary analyses in R. Bioinformatics 35, 526-528 (2019).
[0246] 54. Letunic, I. & Bork, P. Interactive Tree Of Life (iTOL) v4: recent updates and new developments. Nucleic Acids Res 47, W256-w259 (2019).
[0247] 55. Subach, O. M., Cranfill, P. J., Davidson, M. W. & Verkhusha, V. V. An enhanced monomeric blue fluorescent protein with the high chemical stability of the chromophore. PLoS One 6, e28674, (2011).
[0248] 56. Nagai, T. et al. A variant of yellow fluorescent protein with fast and efficient maturation for cell-biological applications. Nat Biotechnol 20, 87-90, (2002).
[0249] 57. Shaner, N. C. et al. Improved monomeric red, orange and yellow fluorescent proteins derived from Discosoma sp. red fluorescent protein. Nature Biotechnology 22, 1567-1572, (2004).
[0250] 58. Tomosugi, W. et al. An ultramarine fluorescent protein with increased photostability and pH insensitivity. Nature Methods 6, 351-353, (2009).
[0251] 59. Rizzo, M. A. & Piston, D. W. High-contrast imaging of fluorescent protein FRET by fluorescence polarization microscopy. Biophys J 88, L14-16, (2005).
[0252] 60. Karasawa, S., Araki, T., Nagai, T., Mizuno, H. & Miyawaki, A. Cyan-emitting and orange-emitting fluorescent proteins as a donor/acceptor pair for fluorescence resonance energy transfer. Biochem J 381, 307-312, (2004).
[0253] 61. Cubitt, A. B., Woollenweber, L. A. & Heim, R. Understanding structure-function relationships in the Aequorea victoria green fluorescent protein. Methods Cell Biol 58, 19-30 (1999).
[0254] 62. Hoi, H. et al. An engineered monomeric Zoanthus sp. yellow fluorescent protein. Chem Biol 20, 1296-1304, (2013).
[0255] 63. Bindels, D. S. et al. mScarlet: a bright monomeric red fluorescent protein for cellular imaging. Nature Methods 14, 53-56, (2016).
[0256] 64. Piatkevich, K. D. et al. Monomeric red fluorescent proteins with a large Stokes shift. Proceedings of the National Academy of Sciences, 107(12), 5369-74, (2010).
[0257] 65. Shcherbo, D. et al. Near-infrared fluorescent proteins. Nat Methods 7, 827-829, (2010).
[0258] 66. Strack, R. L. et al. A rapidly maturing far-red derivative of DsRed-Express2 for whole-cell labeling. Biochemistry 48, 8279-8281, (2009).
[0259] 67. Bajar, B. T. et al. Fluorescent indicators for simultaneous reporting of all four cell cycle phases. Nat Methods 13, 993-996, (2016).
[0260] 68 Fabritius, A. et al. Imaging-Based Screening Platform Assists Protein Engineering. Cell Chem Biol 25, 15541561.e1558, (2018).
[0261] 69. Lutz, R. & Bujard, H. Independent and tight regulation of transcriptional units in Escherichia coli via the LacR/O, the TetR/O and AraC/I1-I2 regulatory elements. Nucleic Acids Res 25, 1203-1210, (1997).
[0262] 70. Song, W. et al. Divergent rRNAs as regulators of gene expression at the ribosome level. Nat Microbiol 4, 515-526 (2019).
[0263] 71. Hui, A. & de Boer, H. A. Specialized ribosome system: preferential translation of a single mRNA species by a subpopulation of mutated ribosomes in Escherichia coli. Proc Natl Acad Sci USA 84, 4762-6 (1987).
[0264] 72. Brink, M. F., Verbeet, M. P. & de Boer, H. A. Specialized ribosomes: highly specific translation in vivo of a single targeted mRNA species. Gene 156, 215-22 (1995).
[0265] 73. Hui, A., Jhurani, P. & de Boer, H. A. Directing ribosomes to a single mRNA species: a method to study ribosomal RNA mutations and their effects on translation of a single messenger in Escherichia coli. Methods Enzymol 153, 432-52 (1987).
[0266] 74. Lee, K., Holland-Staley, C. A. & Cunningham, P. R. Genetic analysis of the Shine-Dalgamo interaction: selection of alternative functional mRNA-rRNA combinations. Rna 2, 1270-85 (1996).
[0267] 75. Cochella, L. & Green, R. Isolation of antibiotic resistance mutations in the rRNA by using an in vitro selection system. Proc Natl Acad Sci USA 101, 3786-91 (2004).
[0268] 76. Wang, H. H. & Church, G. M. Multiplexed genome engineering and genotyping methods applications for synthetic biology and metabolic engineering. Methods Enzymol 498, 409-26 (2011).
[0269] 77. Datsenko, K. A. & Wanner, B. L. One-step inactivation of chromosomal genes in Escherichia coli K-12 using PCR products. Proc Natl Acad Sci USA 97, 6640-5 (2000).
[0270] 78. Gupta, P., Kannan, K., Mankin, A. S. & Vazquez-Laslop, N. Regulation of gene expression by macrolide-induced ribosomal frameshifting. Mol Cell 52, 629-42 (2013).
[0271] 79. Held, W. A., Ballou, B., Mizushima, S. & Nomura, M. Assembly mapping of 30 S ribosomal proteins from Escherichia coli. Further studies. J Biol Chem 249, 3103-11 (1974).
[0272] 80. Sengupta, J., Agrawal, R. K. & Frank, J. Visualization of protein S1 within the 30S ribosomal subunit and its interaction with messenger RNA. Proc Natl Acad Sci USA 98, 11991-6 (2001).
[0273] 81. Marzi, S. et al. Structured mRNAs regulate translation initiation by binding to the platform of the ribosome. Cell 130, 1019-31 (2007).

[0274] All patents and publications mentioned in the specification are indicative of the levels of skill of those skilled in the art to which the disclosure pertains. All references cited in this disclosure are incorporated by reference to the same extent as if each reference had been incorporated by reference in its entirety individually.

[0275] One skilled in the art would readily appreciate that the present disclosure is well adapted to carry out the objects and obtain the ends and advantages mentioned, as well as those inherent therein. The methods and compositions described herein as presently representative of preferred embodiments are exemplary and are not intended as limitations on the scope of the disclosure. Changes therein and other uses will occur to those skilled in the art, which are encompassed within the spirit of the disclosure, are defined by the scope of the claims.

[0276] In addition, where features or aspects of the disclosure are described in terms of Markush groups or other grouping of alternatives, those skilled in the art will recognize that the disclosure is also thereby described in terms of any individual member or subgroup of members of the Markush group or other group.

[0277] The use of the terms “a” and “an” and “the” and similar referents in the context of describing the disclosure (especially in the context of the following claims) are to be construed to cover both the singular and the plural, unless otherwise indicated herein or clearly contradicted by context. The terms “comprising,” “having,” “including,” and “containing” are to be construed as open-ended terms (i.e., meaning “including, but not limited to,”) unless otherwise noted. Recitation of ranges of values herein are merely intended to serve as a shorthand method of referring individually to each separate value falling within the range, unless otherwise indicated herein, and each separate value is incorporated into the specification as if it were individually recited herein.

[0278] All methods described herein can be performed in any suitable order unless otherwise indicated herein or otherwise clearly contradicted by context. The use of any and all examples, or exemplary language (e.g., “such as”) provided herein, is intended merely to better illuminate the disclosure and does not pose a limitation on the scope of the disclosure unless otherwise claimed. No language in the specification should be construed as indicating any non-claimed element as essential to the practice of the disclosure.

[0279] Embodiments of this disclosure are described herein, including the best mode known to the inventors for carrying out the disclosed invention. Variations of those embodiments may become apparent to those of ordinary skill in the art upon reading the instant description.

[0280] The disclosure illustratively described herein suitably can be practiced in the absence of any element or elements, limitation or limitations that are not specifically disclosed herein. Thus, for example, in each instance herein any of the terms “comprising”, “consisting essentially of”, and “consisting of” may be replaced with either of the other two terms. The terms and expressions which have been employed are used as terms of description and not of limitation, and there is no intention that in the use of such terms and expressions of excluding any equivalents of the features shown and described or portions thereof, but it is recognized that various modifications are possible within the scope of the invention claimed. Thus, it should be understood that although the present disclosure provides preferred embodiments, optional features, modification and variation of the concepts herein disclosed may be resorted to by those skilled in the art, and that such modifications and variations are considered to be within the scope of this disclosure as defined by the description and the appended claims.

[0281] It will be readily apparent to one skilled in the art that varying substitutions and modifications can be made to the invention disclosed herein without departing from the scope and spirit of the invention. Thus, such additional embodiments are within the scope of the present disclosure and the following claims. The inventors expect skilled artisans to employ such variations as appropriate, and the inventors intend for the disclosure to be practiced otherwise than as specifically described herein. Accordingly, this disclosure includes all modifications and equivalents of the subject matter recited in the claims appended hereto as permitted by applicable law. Moreover, any combination of the above-described elements in all possible variations thereof is encompassed by the disclosure unless otherwise indicated herein or otherwise clearly contradicted by context. Those skilled in the art will recognize, or be able to ascertain using no more than routine experimentation, many equivalents to the specific embodiments of the disclosure described herein. Such equivalents are intended to be encompassed by the following claims.

The application's sequence listing, which the Patent Office published only in electronic form, follows.

SEQUENCE LISTING (479 sequences)

SEQ ID NO: 1 - DNA, 7418 bp, Artificial
  Synthetic
agacttagggaccctgcggccgccattaattcctaatttttgttgacactctatcattgatagagttattttaccactccctatcagtgatagagaaaagtgaaatgaatagaccggccgctgagaaaaagcgaagcggcactgctctttaacaatttatcagacaatctgtgtgggcactcgaagatacggattcttaacgtcgcaagacgaaaaatgaataccaagtctcaagagtgaacacgtaattcattacgaagtttaattctttgagcgtcaaacttttaaattgaagagtttgatcatggctcagattgaacgctggcggcaggcctaacacatgcaagtcgaacggtaacaggaagaagcttgcttctttgctgacgagtggcggacgggtgagtaatgtctgggaaactgcctgatggagggggataactactggaaacggtagctaataccgcataacgtcgcaagaccaaagagggggaccttcgggcctcttgccatcggatgtgcccagatgggattagctagtaggtggggtaacggctcacctaggcgacgatccctagctggtctgagaggatgaccagccacactggaactgagacacggtccagactcctacgggaggcagcagtggggaatattgcacaatgggcgcaagcctgatgcagccatgccgcgtgtatgaagaaggccttcgggttgtaaagtactttcagcggggaggaagggagtaaagttaatacctttgctcattgacgttacccgcagaagaagcaccggctaactccgtgccagcagccgcggtaatacggagggtgcaagcgttaatcggaattactgggcgtaaagcgcacgcaggcggtttgttaagtcagatgtgaaatccccgggctcaacctgggaactgcatctgatactggcaagcttgagtctcgtagaggggggtagaattccaggtgtagcggtgaaatgcgtagagatctggaggaataccggtggcgaaggcggccccctggacgaagactgacgctcaggtgcgaaagcgtggggagcaaacaggattagataccctggtagtccacgccgtaaacgatgtcgacttggaggttgtgcccttgaggcgtggcttccggagctaacgcgttaagtcgaccgcctggggagtacggccgcaaggttaaaactcaaatgaattgacgggggcccgcacaagcggtggagcatgtggtttaattcgatgcaacgcgaagaaccttacctggtcttgacatccacggaagttttcagagatgagaatgtgccttcgggaaccgtgagacaggtgctgcatggctgtcgtcagctcgtgttgtgaaatgttgggttaagtcccgcaacgagcgcaacccttatcctttgttgccagcggtccggccgggaactcaaaggagactgccagtgataaactggaggaaggtggggatgacgtcaagtcatcatggcccttacgaccagggctacacacgtgctacaatggcgcatacaaagagaagcgacctcgcgagagcaagcggacctcataaagtgcgtcgtagtccggattggagtctgcaactcgactccatgaagtcggaatcgctagtaatcgtggatcagaatgccacggtgaatacgttcccgggccttgtacacaccgcccgtcacaccatgggagtgggttgcaaaagaagtaggtagcttaaccttcgggagggcgcttaccactttgtgattcatgactggggtgaagtcgtaacaaggtaaccgtaggggaacctgcggttggatcatgtggttaccttaaagaagcgtactttgtagtgctcacacagattgtctgatagaaagtgaaaagcaaggcgtttacgcgttgggagtgaggctgaagagaataaggccgttcgctttctattaatgaaagctcaccctacacgaaaatatcacgcaacgcgtgataagcaattttcgtgtccccttcgtctagaggcccaggacaccgccctttcacggcggtaacaggggttcgaatcccctaggggacgccacttgctggtttgtgagtgaaagtcgccgaccttaatatctcaaaactcatcttcgggtgatgtttgagatatttgctctttaaaaatctggatcaagctgaaaattgaaacactgaacaacgagagttgttcgtgagtctctcaaattttcgcaacacgatgatgaatcgaaagaaacatcttcgggttgtgaggttaagcgactaagcgtacacggtggatgccctggcagtcagaggcgatgaaggacgtgctaatctgcgataagcgtcggtaaggtgatatgaaccgttataaccggcgatttccgaatggggaaacccagtgtgtttcgacacactatcattaactgaatccataggttaatgaggcgaaccgggggaactgaaacatctaagtaccccgaggaaaagaaatcaaccgagattcccccagtagcggcgagcgaacggggagcagcccagagcctgaatcagtgtgtgtgttagtggaagcgtctggaaaggcgcgcgatacagggtgacagccccgtacacaaaaatgcacatgctgtgagctcgatgagtagggcgggacacgtggtatcctgtctgaatatggggggaccatcctccaaggctaaatactcctgactgaccgatagtgaaccagtaccgtgagggaaaggcgaaaagaaccccggcgaggggagtgaaaaagaacctgaaaccgtgtacgtacaagcagtgggagcacgcttaggcgtgtgactgcgtaccttttgtataatgggtcagcgacttatattctgtagcaaggttaaccgaataggggagccgaagggaaaccgagtcttaactgggcgttaagttgcagggtatagacccgaaacccggtgatctagccatgggcaggttgaaggttgggtaacactaactggaggaccgaaccgactaatgttgaaaaattagcggatgacttgtggctgggggtgaaaggccaatcaaaccgggagatagctggttctccccgaaagctatttaggtagcgcctcgtgaattcatctccgggggtagagcactgtttcggcaagggggtcatcccgacttaccaacccgatgcaaactgcgaataccggagaatgttatcacgggagacacacggcgggtgctaacgtccgtcgtgaagagggaaacaacccagaccgccagctaaggtcccaaagtcatggttaagtgggaaacgatgtgggaaggcccagacagccaggatgttggcttagaagcagccatcatttaaagaaagcgtaatagctcactggtcgagtcggcctgcgcggaagatgtaacggggctaaaccatgcaccgaagctgcggcagcgacgcttatgcgttgttgggtaggggagcgttctgtaagcctgcgaaggtgtgctgtgaggcatgctggaggtatcagaagtgcgaatgctgacataagtaacgataaagcgggtgaaaagcccgctcgccggaagaccaagggttcctgtccaacgttaatcggggcagggtgagtcgacccctaaggcgaggccgaaaggcgtagtcgatgggaaacaggttaatattcctgtacttggtgttactgcgaaggggggacggagaaggctatgttggccgggcgacggttgtcccggtttaagcgtgtaggctggttttccaggcaaatccggaaaatcaaggctgaggcgtgatgacgaggcactacggtgctgaagcaacaaatgccctgcttccaggaaaagcctctaagcatcaggtaacatcaaatcgtaccccaaaccgacacaggtggtcaggtagagaataccaaggcgcttgagagaactcgggtgaaggaactaggcaaaatggtgccgtaacttcgggagaaggcacgctgatatgtaggtgaggtccctcgcggatggagctgaaatcagtcgaagataccagctggctgcaactgtttattaaaaacacagcactgtgcaaacacgaaagtggacgtatacggtgtgacgcctgcccggtgccggaaggttaattgatggggttagcgcaagcgaagctcttgatcgaagccccggtaaacggcggccgtaactataacggtcctaaggtagcgaaattccttgtcgggtaagttccgacctgcacgaatggcgtaatgatggccaggctgtctccacccgagactcagtgaaattgaactcgctgtgaagatgcagtgtacccgcggcaagacggaaagaccccgtgaacctttactatagcttgacactgaacattgagccttgatgtgtaggataggtgggaggctttgaagtgtggacgccagtctgcatggagccgaccttgaaataccaccctttaatgtttgatgttctaacgttgacccgtaatccgggttgcggacagtgtctggtgggtagtttgactggggcggtctcctcctaaagagtaacggaggagcacgaaggttggctaatcctggtcggacatcaggaggttagtgcaatggcataagccagcttgactgcgagcgtgacggcgcgagcaggtgcgaaagcaggtcatagtgatccggtggttctgaatggaagggccatcgctcaacggataaaaggtactccggggataacaggctgataccgcccaagagttcatatcgacggcggtgtttggcacctcgatgtcggctcatcacatcctggggctgaagtaggtcccaagggtatggctgttcgccatttaaagtggtacgcgagctgggtttagaacgtcgtgagacagttcggtccctatctgccgtgggcgctggagaactgaggggggctgctcctagtacgagaggaccggagtggacgcatcactggtgttcgggttgtcatgccaatggcactgcccggtagctaaatgcggaagagataagtgctgaaagcatctaagcacgaaacttgccccgagatgagttctccctgaccctttaagggtcctgaaggaacgttgaagacgacgacgttgataggccgggtgtgtaagcgcagcgatgcgttgagctaaccggtactaatgaaccgtgaggcttaaccttacaacgccgaagctgttttggcggatgagagaagattttcagcctgatacagattaaatcagaacgcagaagcggtctgataaaacagaatttgcctggcggcagtagcgcggtggtcccacctgaccccatgccgaactcagaagtgaaacgccgtagcgccgatggtagtgtggggtctccccatgcgagagtagggaactgccaggcatcaaataaaacgaaaggctcagtcgaaagactgggcctttcgttttatctgttgtttgtcggtgaacgctctcctgagtaggacaaatccgccgggagcggatttgaacgttgcgaagcaacggcccggagggtggcgggcaggacgcccgccataaactgccaggcatcaaattaagcagaaggccatcctgacggatggcctttttgcgtttctacaaactcttcctgtcgtcatatctacaagccggcgcgccgggaaatgtgcgcggaacccctatttgtttatttttctaaatacattcaaatatgtatccgctcatgagacaataaccctgataaatgcttcaataatattgaaaaaggaagagtatgagtattcaacatttccgtgtcgcccttattcccttttttgcggcattttgccttcctgtttttgctcacccagaaacgctggtgaaagtaaaagatgctgaagatcagttgggtgcacgagtgggttacatcgaactggatctcaacagcggtaagatccttgagagttttcgccccgaagaacgttttccaatgatgagcacttttaaagttctgctatgtggcgcggtattatcccgtgttgacgccgggcaagagcaactcggtcgccgcatacactattctcagaatgacttggttgagtactcaccagtcacagaaaagcatcttacggatggcatgacagtaagagaattatgcagtgctgcaataaccatgagtgataacactgcggccaacttacttctgacaacgatcggaggaccgaaggagctaaccgcttttttgcacaacatgggggatcatgtaactcgccttgatcgttgggaaccggagctgaatgaagccataccaaacgacgagcgtgacaccacgatgcctgcagcaatggcaacaacgttgcgcaaactattaactggcgaactacttactctagcttcccggcaacaattaatagactggatggaggcggataaagttgcaggaccacttctgcgctcggcccttccggctagctggtttattgctgataaatctggagccggtgagcgtgggtctcgcggtatcattgcagcactggggccagatggtaagccctcccgtatcgtagttatctacacgacggggagtcaggcaactatggatgaacgaaatagacagatcgctgagataggtgcctcactgattaagcattggtaactgcagaccaagtttactcatatatactttagattgatttaaaacttcatttttaatttaaaaggatctaggtgaagatcctttttgataatctcatgaccaaaatcccttaacgtgagttttcgttccactgagcgtcagaccccgtagaaaagatcaaaggatcttcttgagatcctttttttctgcgcgtaatctgctgcttgcaaacaaaaaaaccaccgctaccagcggtggtttgtttgccggatcaagagctaccaactctttttccgaaggtaactggcttcagcagagcgcagataccaaatactgtccttctagtgtagccgtagttaggccaccacttcaagaactctgtagcaccgcctacatacctcgctctgctaatcctgttaccagtggctgctgccagtggcgataagtcgtgtcttaccgggttggactcaagacgatagttaccggataaggcgcagcggtcgggctgaacggggggttcgtgcacacagcccagcttggagcgaacgacctacaccgaactgagatacctacagcgtgagctatgagaaagcgccacgcttcccgaagggagaaaggcggacaggtatccggtaagcggcagggtcggaacaggagagcgcacgagggagcttccagggggaaacgcctggtatctttatagtcctgtcgggtttcgccacctctgacttgagcgtcgatttttgtgatgctcgtcaggggggcggagcctatggaaaaacgccagcaacgcggcctttttacggttcctggccttttgctgg

SEQ ID NO: 2 - DNA, 7451 bp, Artificial
  Synthetic
gcggccgcgatctctcacctaccaaacaatgcccccctgcaaaaaataaattcatataaaaaacatacagataaccatctgcggtgatccctatcagtgatagagattgacatccctatcagtgatagagatactgagcacgggtaccggccgctgagaaaaagcgaagcggcactgctctttaacaatttatcagacaatctgtgtgggcactcgaagatacggattcttaacgtcgcaagacgaaaaatgaataccaagtctcaagagtgaacacgtaattcattacgaagtttaattctttgagcgtcaaacttttaaattgaagagtttgatcatggctcagattgaacgctggcggcaggcctaacacatgcaagtcgaacggtaacaggaagaagcttgcttctttgctgacgagtggcggacgggtgagtaatgtctgggaaactgcctgatggagggggataactactggaaacggtagctaataccgcataacgtcgcaagaccaaagagggggaccttcgggcctcttgccatcggatgtgcccagatgggattagctagtaggtggggtaacggctcacctaggcgacgatccctagctggtctgagaggatgaccagccacactggaactgagacacggtccagactcctacgggaggcagcagtggggaatattgcacaatgggcgcaagcctgatgcagccatgccgcgtgtatgaagaaggccttcgggttgtaaagtactttcagcggggaggaagggagtaaagttaatacctttgctcattgacgttacccgcagaagaagcaccggctaactccgtgccagcagccgcggtaatacggagggtgcaagcgttaatcggaattactgggcgtaaagcgcacgcaggcggtttgttaagtcagatgtgaaatccccgggctcaacctgggaactgcatctgatactggcaagcttgagtctcgtagaggggggtagaattccaggtgtagcggtgaaatgcgtagagatctggaggaataccggtggcgaaggcggccccctggacgaagactgacgctcaggtgcgaaagcgtggggagcaaacaggattagataccctggtagtccacgccgtaaacgatgtcgacttggaggttgtgcccttgaggcgtggcttccggagctaacgcgttaagtcgaccgcctggggagtacggccgcaaggttaaaactcaaatgaattgacgggggcccgcacaagcggtggagcatgtggtttaattcgatgcaacgcgaagaaccttacctggtcttgacatccacggaagttttcagagatgagaatgtgccttcgggaaccgtgagacaggtgctgcatggctgtcgtcagctcgtgttgtgaaatgttgggttaagtcccgcaacgagcgcaacccttatcctttgttgccagcggtccggccgggaactcaaaggagactgccagtgataaactggaggaaggtggggatgacgtcaagtcatcatggcccttacgaccagggctacacacgtgctacaatggcgcatacaaagagaagcgacctcgcgagagcaagcggacctcataaagtgcgtcgtagtccggattggagtctgcaactcgactccatgaagtcggaatcgctagtaatcgtggatcagaatgccacggtgaatacgttcccgggccttgtacacaccgcccgtcacaccatgggagtgggttgcaaaagaagtaggtagcttaaccttcgggagggcgcttaccactttgtgattcatgactggggtgaagtcgtaacaaggtaaccgtaggggaacctgcggttggatcatgtggttaccttaaagaagcgtactttgtagtgctcacacagattgtctgatagaaagtgaaaagcaaggcgtttacgcgttgggagtgaggctgaagagaataaggccgttcgctttctattaatgaaagctcaccctacacgaaaatatcacgcaacgcgtgataagcaattttcgtgtccccttcgtctagaggcccaggacaccgccctttcacggcggtaacaggggttcgaatcccctaggggacgccacttgctggtttgtgagtgaaagtcgccgaccttaatatctcaaaactcatcttcgggtgatgtttgagatatttgctctttaaaaatctggatcaagctgaaaattgaaacactgaacaacgagagttgttcgtgagtctctcaaattttcgcaacacgatgatgaatcgaaagaaacatcttcgggttgtgaggttaagcgactaagcgtacacggtggatgccctggcagtcagaggcgatgaaggacgtgctaatctgcgataagcgtcggtaaggtgatatgaaccgttataaccggcgatttccgaatggggaaacccagtgtgtttcgacacactatcattaactgaatccataggttaatgaggcgaaccgggggaactgaaacatctaagtaccccgaggaaaagaaatcaaccgagattcccccagtagcggcgagcgaacggggagcagcccagagcctgaatcagtgtgtgtgttagtggaagcgtctggaaaggcgcgcgatacagggtgacagccccgtacacaaaaatgcacatgctgtgagctcgatgagtagggcgggacacgtggtatcctgtctgaatatggggggaccatcctccaaggctaaatactcctgactgaccgatagtgaaccagtaccgtgagggaaaggcgaaaagaaccccggcgaggggagtgaaaaagaacctgaaaccgtgtacgtacaagcagtgggagcacgcttaggcgtgtgactgcgtaccttttgtataatgggtcagcgacttatattctgtagcaaggttaaccgaataggggagccgaagggaaaccgagtcttaactgggcgttaagttgcagggtatagacccgaaacccggtgatctagccatgggcaggttgaaggttgggtaacactaactggaggaccgaaccgactaatgttgaaaaattagcggatgacttgtggctgggggtgaaaggccaatcaaaccgggagatagctggttctccccgaaagctatttaggtagcgcctcgtgaattcatctccgggggtagagcactgtttcggcaagggggtcatcccgacttaccaacccgatgcaaactgcgaataccggagaatgttatcacgggagacacacggcgggtgctaacgtccgtcgtgaagagggaaacaacccagaccgccagctaaggtcccaaagtcatggttaagtgggaaacgatgtgggaaggcccagacagccaggatgttggcttagaagcagccatcatttaaagaaagcgtaatagctcactggtcgagtcggcctgcgcggaagatgtaacggggctaaaccatgcaccgaagctgcggcagcgacgcttatgcgttgttgggtaggggagcgttctgtaagcctgcgaaggtgtgctgtgaggcatgctggaggtatcagaagtgcgaatgctgacataagtaacgataaagcgggtgaaaagcccgctcgccggaagaccaagggttcctgtccaacgttaatcggggcagggtgagtcgacccctaaggcgaggccgaaaggcgtagtcgatgggaaacaggttaatattcctgtacttggtgttactgcgaaggggggacggagaaggctatgttggccgggcgacggttgtcccggtttaagcgtgtaggctggttttccaggcaaatccggaaaatcaaggctgaggcgtgatgacgaggcactacggtgctgaagcaacaaatgccctgcttccaggaaaagcctctaagcatcaggtaacatcaaatcgtaccccaaaccgacacaggtggtcaggtagagaataccaaggcgcttgagagaactcgggtgaaggaactaggcaaaatggtgccgtaacttcgggagaaggcacgctgatatgtaggtgaggtccctcgcggatggagctgaaatcagtcgaagataccagctggctgcaactgtttattaaaaacacagcactgtgcaaacacgaaagtggacgtatacggtgtgacgcctgcccggtgccggaaggttaattgatggggttagcgcaagcgaagctcttgatcgaagccccggtaaacggcggccgtaactataacggtcctaaggtagcgaaattccttgtcgggtaagttccgacctgcacgaatggcgtaatgatggccaggctgtctccacccgagactcagtgaaattgaactcgctgtgaagatgcagtgtacccgcggcaagacggaaagaccccgtgaacctttactatagcttgacactgaacattgagccttgatgtgtaggataggtgggaggctttgaagtgtggacgccagtctgcatggagccgaccttgaaataccaccctttaatgtttgatgttctaacgttgacccgtaatccgggttgcggacagtgtctggtgggtagtttgactggggcggtctcctcctaaagagtaacggaggagcacgaaggttggctaatcctggtcggacatcaggaggttagtgcaatggcataagccagcttgactgcgagcgtgacggcgcgagcaggtgcgaaagcaggtcatagtgatccggtggttctgaatggaagggccatcgctcaacggataaaaggtactccggggataacaggctgataccgcccaagagttcatatcgacggcggtgtttggcacctcgatgtcggctcatcacatcctggggctgaagtaggtcccaagggtatggctgttcgccatttaaagtggtacgcgagctgggtttagaacgtcgtgagacagttcggtccctatctgccgtgggcgctggagaactgaggggggctgctcctagtacgagaggaccggagtggacgcatcactggtgttcgggttgtcatgccaatggcactgcccggtagctaaatgcggaagagataagtgctgaaagcatctaagcacgaaacttgccccgagatgagttctccctgaccctttaagggtcctgaaggaacgttgaagacgacgacgttgataggccgggtgtgtaagcgcagcgatgcgttgagctaaccggtactaatgaaccgtgaggcttaaccttacaacgccgaagctgttttggcggatgagagaagattttcagcctgatacagattaaatcagaacgcagaagcggtctgataaaacagaatttgcctggcggcagtagcgcggtggtcccacctgaccccatgccgaactcagaagtgaaacgccgtagcgccgatggtagtgtggggtctccccatgcgagagtagggaactgccaggcatcaaataaaacgaaaggctcagtcgaaagactgggcctttcgttttatctgttgtttgtcggtgaacgctctcctgagtaggacaaatccgccgggagcggatttgaacgttgcgaagcaacggcccggagggtggcgggcaggacgcccgccataaactgccaggcatcaaattaagcagaaggccatcctgacggatggcctttttgcgtttctacaaactcttcctgtcgtcatatctacaagccggcgcgccgggaaatgtgcgcggaacccctatttgtttatttttctaaatacattcaaatatgtatccgctcatgagacaataaccctgataaatgcttcaataatattgaaaaaggaagagtatgagtattcaacatttccgtgtcgcccttattcccttttttgcggcattttgccttcctgtttttgctcacccagaaacgctggtgaaagtaaaagatgctgaagatcagttgggtgcacgagtgggttacatcgaactggatctcaacagcggtaagatccttgagagttttcgccccgaagaacgttttccaatgatgagcacttttaaagttctgctatgtggcgcggtattatcccgtgttgacgccgggcaagagcaactcggtcgccgcatacactattctcagaatgacttggttgagtactcaccagtcacagaaaagcatcttacggatggcatgacagtaagagaattatgcagtgctgcaataaccatgagtgataacactgcggccaacttacttctgacaacgatcggaggaccgaaggagctaaccgcttttttgcacaacatgggggatcatgtaactcgccttgatcgttgggaaccggagctgaatgaagccataccaaacgacgagcgtgacaccacgatgcctgcagcaatggcaacaacgttgcgcaaactattaactggcgaactacttactctagcttcccggcaacaattaatagactggatggaggcggataaagttgcaggaccacttctgcgctcggcccttccggctagctggtttattgctgataaatctggagccggtgagcgtgggtctcgcggtatcattgcagcactggggccagatggtaagccctcccgtatcgtagttatctacacgacggggagtcaggcaactatggatgaacgaaatagacagatcgctgagataggtgcctcactgattaagcattggtaactgcagaccaagtttactcatatatactttagattgatttaaaacttcatttttaatttaaaaggatctaggtgaagatcctttttgataatctcatgaccaaaatcccttaacgtgagttttcgttccactgagcgtcagaccccgtagaaaagatcaaaggatcttcttgagatcctttttttctgcgcgtaatctgctgcttgcaaacaaaaaaaccaccgctaccagcggtggtttgtttgccggatcaagagctaccaactctttttccgaaggtaactggcttcagcagagcgcagataccaaatactgtccttctagtgtagccgtagttaggccaccacttcaagaactctgtagcaccgcctacatacctcgctctgctaatcctgttaccagtggctgctgccagtggcgataagtcgtgtcttaccgggttggactcaagacgatagttaccggataaggcgcagcggtcgggctgaacggggggttcgtgcacacagcccagcttggagcgaacgacctacaccgaactgagatacctacagcgtgagctatgagaaagcgccacgcttcccgaagggagaaaggcggacaggtatccggtaagcggcagggtcggaacaggagagcgcacgagggagcttccagggggaaacgcctggtatctttatagtcctgtcgggtttcgccacctctgacttgagcgtcgatttttgtgatgctcgtcaggggggcggagcctatggaaaaacgccagcaacgcggcctttttacggttcctggccttttgctgg

SEQ ID NO: 3 - DNA, 7400 bp, Artificial
  Synthetic
agacttagggaccctgcggccgccattaattcctaatttttgttgacactctatcattgatagagttattttaccactccctatcagtgatagagaaaagtgaaatgaatagaccggccgctgagaaaaagcgaagcggcactgctctttaacaatttatcagacaatctgtgtgggcactcgaagatacggattcttaacgtcgcaagacgaaaaatgaataccaagtctcaagagtgaacacgtaattcattacgaagtttaattctttgagcgtcaaactttttaactgaagagtttgatcatggctcagattgaacgctggcggcaggcttaacacatgcaagtcgagcgggggaaggtagcttgctaccggacctagcggcggacgggtgagtaatgcttaggaatctgcctattagtgggggacaacatctcgaaagggatgctaataccgcatacgtcctacgggagaaagcaggggatcttcggaccttgcgctaatagatgagcctaagtcggattagctagttggtggggtaaaggcctaccaaggcgacgatctgtagcgggtctgagaggatgatccgccacactgggactgagacacggcccagactcctacgggaggcagcagtggggaatattggacaatgggcgcaagcctgatccagccatgccgcgtgtgtgaagaaggccttatggttgtaaagcactttaagcgaggaggaggctactttagataatacctagagatagtggacgttactcgcagaataagcaccggctaactctgtgccagcagccgcggtaatacagagggtgcaagcgttaatcggatttactgggcgtaaagcgcgcgtaggcggctaattaagtcaaatgtgaaatccccgagcttaacttgggaattgcattcgatactggttagctagagtgtgggagaggatggtagaattccaggtgtagcggtgaaatgcgtagagatctggaggaataccgatggcgaaggcagccatctggcctaacactgacgctgaggtgcgaaagcatggggagcaaacaggattagataccctggtagtccatgccgtaaacgatgtctactagccgttggggcctttgaggctttagtggcgcagctaacgcgataagtagaccgcctggggagtacggtcgcaagactaaaactcaaatgaattgacgggggcccgcacaagcggtggagcatgtggtttaattcgatgcaacgcgaagaaccttacctggccttgacatagtaagaactttccagagatggattggtgccttcgggaacttacatacaggtgctgcatggctgtcgtcagctcgtgtcgtgagatgttgggttaagtcccgcaacgagcgcaacccttttccttatttgccagcgagtaatgtcgggaactttaaggatactgccagtgacaaactggaggaaggcggggacgacgtcaagtcatcatggcccttacggccagggctacacacgtgctacaatggtcggtacaaagggttgctacacagcgatgtgatgctaatctcaaaaagccgatcgtagtccggattggagtctgcaactcgactccatgaagtcggaatcgctagtaatcgcggatcagaatgccgcggtgaatacgttcccgggccttgtacacaccgcccgtcacaccatgggagtttgttgcaccagaagtagctagcctaactgcaaagagggcggttaccacggtgtggccgatgactggggtgaagtcgtaacaaggtagccgtaggggaacctgcggctggatcatgtggtatccttaaagaagcgtactttgtagtgctcacacagattgtctgatagaaagtgaaaagcaaggcgtttacgcgttgggagtgaggctgaagagaataaggccgttcgctttctattaatgaaagctcaccctacacgaaaatatcacgcaacgcgtgataagcaattttcgtgtccccttcgtctagaggcccaggacaccgccctttcacggcggtaacaggggttcgaatcccctaggggacgccacttgctggtttgtgagtgaaagtcgccgaccttaatatctcaaaactcatcttcgggtgatgtttgagatatttgctctttaaaaatctggatcaagctgaaaattgaaacactgaacaacgagagttgttcgtgagtctctcaaattttcgcaacacgatgatgaatcgaaagaaacatcttcgggttgtgaagtcaagtaattaagtgcatgtggtggatgccttggcagtcagaggcgatgaaagacgtgatagcctgcgaaaagctccggggaggcggcaaatatcctttgatccggagatgtctgaatgggggaacccacctactttaaggtaggtattgcaacatgaatacatagtgttgcaaggcgaacgaggggaagtgaaacatctcagtacccttaggaaaagaaatcaattgagattccctcagtagcggcgagcgaacggggatcagcccattaagttatgtgtgttttagtggaacgctctgggaagtgcgaacgtagagggtgatattcccgtacacgaaagggcacacataatgatgacgagtagggcgaggcacgtgaaaccttgtctgaatatggggggaccatcctccaaggctaaatactcctgactgaccgatagtgaaccagtaccgtgagggaaaggcgaaaagaacccctgtgaggggagtgaaatagatcctgaaaccgcatgcatacaagcagtgggagcaccttcgtggtgtgactgcgtaccttttgtataatgggtcagcgacttatattcagtagcgaggttaaccgtataggggagccgtagagaaatcgagtcttaatagggcgtttagttgctgggtatagacccgaaaccaggcgatctatccatgagcaggttgaaggttgggtaacactaactggaggaccgaacccactgtcgttgaaaagccaggggatgacttgtggataggggtgaaaggctaatcaagcctggtgatagctggttctccccgaaagctatttaggtagcgcctcggacgaataccatagggggtagagcactgtttcggctagggggtcatcccgacttaccaaaccgatgcaaactccgaatacctatgagtactatccgggagacagactgcgggtgctaacgtccgtagtcaagaggaaaacaatccagaccgccagctaaggccccaaaatcatagttaagtgggaaacgatgtgggaaggcatagacagctaggaggttggcttagaagcagccaccctttaaagaaagcgtaatagctcactagtcgagtcggcctgcgcggaagatgtaacggggctaaaactatgtgccgaagctgcggatttgacattagtcaagtggtaggggagcgttctgtaagccgatgaaggtgtattgagaagtatgctggaggtatcagaagtgcgaatgctgacgtgagtaacgacaaaacgggtgaaaaacccgttcgccgaaagaccaagggttccagtccaacgttaatcggggctgggtgagtcgacccctaaggcgaggccgaaaggcgtagtcgatgggaaattggttaatattccaatacttctgtgtaatgcgatgagaggacggagaaggttaagtcagcctggcgttggttgtccaggtggaaggatgtaggtatgtatcttaggcaaatccggggtactctatactgagatccgatagcaagctgtacttgtacagcgaagtggctgataccatgcttccaggaaaagtctctaagcttcagttacacaggaatcgtacccgaaaccgacacaggtggtcaggtcgagtagaccaaggcgcttgagagaactctgctgaaggaactaggcaaaatggtaccgtaacttcgggagaaggtacgctgttgttggtgatggaacttgcttcctgagctgatgacagccgcagaaaccaggccgctgcaactgtttattaaaaacatagcactctgcaaacacgaaagtggacgtatagggtgtgatgcctgcccggtgctggaaggttaattgatggggttagcgtaagcgaagctcttgatcgaagccccagtaaacggcggccgtaactataacggtcctaaggtagcgaaattccttgtcgggtaagttccgacctgcacgaatggcataatgatggcggcgctgtctccagcagaggctcagtgaaatcgaaatcgctgtgaagatgcagtgtacccgcggctagacggaaagaccccgtgaacctttactgcagcttgacactgaactttgaccttacttgtgtaggataggtgggaggctttgaagttggaacgctagttccaatggagccgtccttgaaataccaccctggtaatgttgaggttctaactctgtcccgttatccgggacgaggaccgtgtctggtgggtagtttgactggggcggtctcctcctaaagagtaacggaggagtacgaaggtgcgctcagcgtggtcggaaatcacgcatagagtataaaggcaaaagcgcgcttaactgcgagacccacaagtcgagcaggtacgaaagtaggtcttagtgatccggtggttctgtatggaagggccatcgctcaacggataaaaggtactctggggataacaggctgataccgcccaagagttcatatcgacggcggtgtttggcacctcgatgtcggctcatctcatcctggggctgaagcaggtcccaagggtatggctgttcgccatttaaagaggtacgcgagctgggtttagaacgtcgtgagacagttcggtccctatctaccgtgggcgctggaaatttgagaggatctgctcctagtacgagaggaccagagtggacgaacctctggtgtaccggttgtgacgccagtcgcatcgccgggtagctatgttcggaagggataaccgctgaaagcatctaagcgggaagcctacctcaagataagatttccctaggaatttattcctctaaagagccgttcgagactaggacgttgataggttggatgtggaagcatagtgatatgtgaagctgaccaatactaattgctcgtgaggcttgactatacaacgccgaagctgttttggcggatgagagaagattttcagcctgatacagattaaatcagaacgcagaagcggtctgataaaacagaattgtgctggcgaccatagcaagagtgaaccacctgatcccttcccgaactcagaagtgaaacctcttagcgctgatggtagtgtggggttacccatgtgagagtaagtcatcgccagctcacaaataaaacgaaaggctcagtcgaaagactgggcctttcgttttatctgttgtttgtcggtgaacgctctcctgagtaggacaaatccgccgggagcggatttgaacgttgcgaagcaacggcccggagggtggcgggcaggacgcccgccataaactgccaggcatcaaattaagcagaaggccatcctgacggatggcctttttgcgtttctacaaactcttcctgtcgtcatatctacaagccggcgcgccgggaaatgtgcgcggaacccctatttgtttatttttctaaatacattcaaatatgtatccgctcatgagacaataaccctgataaatgcttcaataatattgaaaaaggaagagtatgagtattcaacatttccgtgtcgcccttattcccttttttgcggcattttgccttcctgtttttgctcacccagaaacgctggtgaaagtaaaagatgctgaagatcagttgggtgcacgagtgggttacatcgaactggatctcaacagcggtaagatccttgagagttttcgccccgaagaacgttttccaatgatgagcacttttaaagttctgctatgtggcgcggtattatcccgtgttgacgccgggcaagagcaactcggtcgccgcatacactattctcagaatgacttggttgagtactcaccagtcacagaaaagcatcttacggatggcatgacagtaagagaattatgcagtgctgcaataaccatgagtgataacactgcggccaacttacttctgacaacgatcggaggaccgaaggagctaaccgcttttttgcacaacatgggggatcatgtaactcgccttgatcgttgggaaccggagctgaatgaagccataccaaacgacgagcgtgacaccacgatgcctgcagcaatggcaacaacgttgcgcaaactattaactggcgaactacttactctagcttcccggcaacaattaatagactggatggaggcggataaagttgcaggaccacttctgcgctcggcccttccggctagctggtttattgctgataaatctggagccggtgagcgtgggtctcgcggtatcattgcagcactggggccagatggtaagccctcccgtatcgtagttatctacacgacggggagtcaggcaactatggatgaacgaaatagacagatcgctgagataggtgcctcactgattaagcattggtaactgcagaccaagtttactcatatatactttagattgatttaaaacttcatttttaatttaaaaggatctaggtgaagatcctttttgataatctcatgaccaaaatcccttaacgtgagttttcgttccactgagcgtcagaccccgtagaaaagatcaaaggatcttcttgagatcctttttttctgcgcgtaatctgctgcttgcaaacaaaaaaaccaccgctaccagcggtggtttgtttgccggatcaagagctaccaactctttttccgaaggtaactggcttcagcagagcgcagataccaaatactgtccttctagtgtagccgtagttaggccaccacttcaagaactctgtagcaccgcctacatacctcgctctgctaatcctgttaccagtggctgctgccagtggcgataagtcgtgtcttaccgggttggactcaagacgatagttaccggataaggcgcagcggtcgggctgaacggggggttcgtgcacacagcccagcttggagcgaacgacctacaccgaactgagatacctacagcgtgagctatgagaaagcgccacgcttcccgaagggagaaaggcggacaggtatccggtaagcggcagggtcggaacaggagagcgcacgagggagcttccagggggaaacgcctggtatctttatagtcctgtcgggtttcgccacctctgacttgagcgtcgatttttgtgatgctcgtcaggggggcggagcctatggaaaaacgccagcaacgcggcctttttacggttcctggccttttgctgg

SEQ ID NO: 4 - DNA, 7446 bp, Artificial
  Synthetic
agacttagggaccctgcggccgccattaattcctaatttttgttgacactctatcattgatagagttattttaccactccctatcagtgatagagaaaagtgaaatgaatagaccggccgctgagaaaaagcgaagcggcactgctctttaacaatttatcagacaatctgtgtgggcactcgaagatacggattcttaacgtcgcaagacgaaaaatgaataccaagtctcaagagtgaacacgtaattcattacgaagtttaattctttgagcgtcaaactttttattatgagagtttgatcctggctcaggacgaacgctggcggcgtgcctaatacatgcaagtcgaacgcttctttcctcccgagtgcttgcactcaattggaaagaggagtggcggacgggtgagtaacacgtgggtaacctacccatcagagggggataacacttggaaacaggtgctaataccgcataacagtttatgccgcatggcataagagtgaaaggcgctttcgggtgtcgctgatggatggacccgcggtgcattagctagttggtgaggtaacggctcaccaaggccacgatgcatagccgacctgagagggtgatcggccacactgggactgagacacggcccagactcctacgggaggcagcagtagggaatcttcggcaatggacgaaagtctgaccgagcaacgccgcgtgagtgaagaaggttttcggatcgtaaaactctgttgttagagaagaacaaggacgttagtaactgaacgtcccctgacggtatctaaccagaaagccacggctaactacgtgccagcagccgcggtaatacgtaggtggcaagcgttgtccggatttattgggcgtaaagcgagcgcaggcggtttcttaagtctgatgtgaaagcccccggctcaaccggggagggtcattggaaactgggagacttgagtgcagaagaggagagtggaattccatgtgtagcggtgaaatgcgtagatatatggaggaacaccagtggcgaaggcggctctctggtctgtaactgacgctgaggctcgaaagcgtggggagcaaacaggattagataccctggtagtccacgccgtaaacgatgagtgctaagtgttggagggtttccgcccttcagtgctgcagcaaacgcattaagcactccgcctggggagtacgaccgcaaggttgaaactcaaaggaattgacgggggcccgcacaagcggtggagcatgtggtttaattcgaagcaacgcgaagaaccttaccaggtcttgacatcctttgaccactctagagatagagctttcccttcggggacaaagtgacaggtggtgcatggttgtcgtcagctcgtgtcgtgagatgttgggttaagtcccgcaacgagcgcaacccttattgttagttgccatcatttagttgggcactctagcgagactgccggtgacaaaccggaggaaggtggggatgacgtcaaatcatcatgccccttatgacctgggctacacacgtgctacaatgggaagtacaacgagtcgctagaccgcgaggtcatgcaaatctcttaaagcttctctcagttcggattgcaggctgcaactcgcctgcatgaagccggaatcgctagtaatcgcggatcagcacgccgcggtgaatacgttcccgggccttgtacacaccgcccgtcacaccacgagagtttgtaacacccgaagtcggtgaggtaacctttttggagccagccgcctaaggtgggatagatgattggggtgaagtcgtaacaaggtagccgtatcggaaggtgcggctggatcatgtggtttccttaaagaagcgtactttgtagtgctcacacagattgtctgatagaaagtgaaaagcaaggcgtttacgcgttgggagtgaggctgaagagaataaggccgttcgctttctattaatgaaagctcaccctacacgaaaatatcacgcaacgcgtgataagcaattttcgtgtccccttcgtctagaggcccaggacaccgccctttcacggcggtaacaggggttcgaatcccctaggggacgccacttgctggtttgtgagtgaaagtcgccgaccttaatatctcaaaactcatcttcgggtgatgtttgagatatttgctctttaaaaatctggatcaagctgaaaattgaaacactgaacaacgagagttgttcgtgagtctctcaaattttcgcaacacgatgatgaatcgaaagaaacatcttcgggttgtgaggttaagtgaataagggcgcacggtggatgccttggcactaggagccgatgaaggacgggactaacaccgatatgctttggggagctgtaagtaagctatgatccagagatttccgaatgggggaacccaatatcttttataggatattacttttcagtgaatacatagctgattagaggtagacgcagagaactgaaacatcttagtacctgcaggaagagaaagaaaattcgattccctgagtagcggcgagcgaaacgggaagagcccaaaccaacaagcttgcttgttggggttgtaggactccaatatggtagtctgttagtatagttgaaggatttggaaaattccgctaaagagggtgaaagccccgtagacgaaatgctgacaacacctaggaggatcctgagtacggcggaacacgagaaattccgtcggaatccgcggggaccatcccgcaaggctaaatactccctagtgaccgatagtgaaccagtaccgtgagggaaaggtgaaaagcaccccggaaggggagtgaaatagatcctgaaaccgtgtgcctacaacaagtcaaagctcgttaatgagtgatggcgtgccttttgtagaatgaaccggcgagttacgattgcatgcgaggttaagtcgaagagacggagccgcagcgaaagcgagtctgaatagggcgaatgagtatgtagtcgtagacccgaaaccatgtgatctacccatgtccaggttgaaggtgcggtaaaacgcactggaggaccgaacccacgtacgttgaaaagtgcggggatgaggtgtgggtagcggagaaattccaaacgaacttggagatagctggttctctccgaaatagctttagggctagcctcggaattgagaatgatggaggtagagcactgtttggactaggggcccatctcgggttaccgaattcagataaactccgaatgccattcatttatatccgggagtcagactgcgagtgataagatccgtagtcgaaagggaaacagcccagaccaccagctaaggtcccaaaatatatgttaagtggaaaaggatgtggggttgcacagacaactaggatgttggcttagaagcagccaccatttaaagagtgcgtaatagctcactagtcgagtgaccctgcgccgaaaatgtaccggggctaaacatattaccgaagctgtggactacaccattaggtgtagtggtaggagagcgttctaagggcgttgaaggtcgatcgtgaggacggctggagcgcttagaagtgagaatgccggtatgagtagcgaaagacaggtgagaatcctgtccaccgtatgactaaggtttcctggggaaggctcgtccgcccagggttagtcgggacctaagccgaggccgataggcgtaggcgatggacaacaggttgatattcctgtaccagttgtttttgtttgaacaatggagggacgcagtaggctaaggaatgcatgcgattggaagtgcatgtccaagcaatgagtcttgagtagagttaaatgctttactctttaaggacaagttgtgacggggagcgaaataatagtagcgaagttcctgatgtcacactgccaagaaaagcttctagtgagaaaacaactgcccgtaccgtaaaccgacacaggtagtcgaggagagtatcctaaggtgagcgagcgaactctcgttaaggaactcggcaaaatgaccccgtaacttcgggagaaggggtgctgacttcggtcagccgcagtgaataggcccaagcgactgtttatcaaaaacacaggtctctgcaaaatcgtaagatgaagtataggggctgacgcctgcccggtgctggaaggttaagaggatgggttagcttcggcgaagctcagaattgaagccccagtaaacggcggccgtaactataacggtcctaaggtagcgaaattccttgtcgggtaagttccgacccgcacgaaaggcgtaacgatttgggcactgtctcaacgagagactcggtgaaattttagtacctgtgaagatgcaggttacccgcgacaggacggaaagaccccatggagctttactgtagtttgatattgagtgtttgtaccacatgtacaggataggtaggagccgatgagaccggaacgctagtttcggaggaggcgctggtgggatactacccttgtgttatgaaccctctaacccgcaccactaatcgtggtgggagacagtgtcagatgggcagtttgactggggcggtcgcctcctaaaaggtaacggaggcgcccaaaggttccctcagaatggttggaaatcattcgaagagtgtaaaggcagaagggagcttgactgcgagacctacaagtcgagcagggacgaaagtcgggcttagtgatccggtggttccgcatggaagggccatcgctcaacggataaaagctaccctggggataacaggcttatctcccccaagagtccacatcgacggggaggtttggcacctcgatgtcggctcgtcgcatcctggggctgtagtcggtcccaagggttgggctgttcgcccattaaagcggcacgcgagctgggttcagaacgtcgtgagacagttcggtccctatccgtcgcgggcgttggaaatttgagaggagctgtccttagtacgagaggaccgggatggacttaccgctggtgtaccagttgttctgccaagggcattgctgggtagctatgtagggaagggataaacgctgaaagcatctaagtgtgaagcccacctcaagatgagatttcccatttctttaagaaagtaagacccctgagagatgatcaggtagataggttggaagtggaaggctagtgatagttggagcggaccaatactaatcggtcgaggacttaaccaaacaacgccgaagctgttttggcggatgagagaagattttcagcctgatacagattaaatcagaacgcagaagcggtctgataaaacagaattagtgtggtggcgatagcgagaaggatacacctgttcccatgccgaacacagaagttaagcttcttagcgccgattgtagtgaagggtttccctttgtgagagtaggacgtcgccacgcgacaaataaaacgaaaggctcagtcgaaagactgggcctttcgttttatctgttgtttgtcggtgaacgctctcctgagtaggacaaatccgccgggagcggatttgaacgttgcgaagcaacggcccggagggtggcgggcaggacgcccgccataaactgccaggcatcaaattaagcagaaggccatcctgacggatggcctttttgcgtttctacaaactcttcctgtcgtcatatctacaagccggcgcgccgggaaatgtgcgcggaacccctatttgtttatttttctaaatacattcaaatatgtatccgctcatgagacaataaccctgataaatgcttcaataatattgaaaaaggaagagtatgagtattcaacatttccgtgtcgcccttattcccttttttgcggcattttgccttcctgtttttgctcacccagaaacgctggtgaaagtaaaagatgctgaagatcagttgggtgcacgagtgggttacatcgaactggatctcaacagcggtaagatccttgagagttttcgccccgaagaacgttttccaatgatgagcacttttaaagttctgctatgtggcgcggtattatcccgtgttgacgccgggcaagagcaactcggtcgccgcatacactattctcagaatgacttggttgagtactcaccagtcacagaaaagcatcttacggatggcatgacagtaagagaattatgcagtgctgcaataaccatgagtgataacactgcggccaacttacttctgacaacgatcggaggaccgaaggagctaaccgcttttttgcacaacatgggggatcatgtaactcgccttgatcgttgggaaccggagctgaatgaagccataccaaacgacgagcgtgacaccacgatgcctgcagcaatggcaacaacgttgcgcaaactattaactggcgaactacttactctagcttcccggcaacaattaatagactggatggaggcggataaagttgcaggaccacttctgcgctcggcccttccggctagctggtttattgctgataaatctggagccggtgagcgtgggtctcgcggtatcattgcagcactggggccagatggtaagccctcccgtatcgtagttatctacacgacggggagtcaggcaactatggatgaacgaaatagacagatcgctgagataggtgcctcactgattaagcattggtaactgcagaccaagtttactcatatatactttagattgatttaaaacttcatttttaatttaaaaggatctaggtgaagatcctttttgataatctcatgaccaaaatcccttaacgtgagttttcgttccactgagcgtcagaccccgtagaaaagatcaaaggatcttcttgagatcctttttttctgcgcgtaatctgctgcttgcaaacaaaaaaaccaccgctaccagcggtggtttgtttgccggatcaagagctaccaactctttttccgaaggtaactggcttcagcagagcgcagataccaaatactgtccttctagtgtagccgtagttaggccaccacttcaagaactctgtagcaccgcctacatacctcgctctgctaatcctgttaccagtggctgctgccagtggcgataagtcgtgtcttaccgggttggactcaagacgatagttaccggataaggcgcagcggtcgggctgaacggggggttcgtgcacacagcccagcttggagcgaacgacctacaccgaactgagatacctacagcgtgagctatgagaaagcgccacgcttcccgaagggagaaaggcggacaggtatccggtaagcggcagggtcggaacaggagagcgcacgagggagcttccagggggaaacgcctggtatctttatagtcctgtcgggtttcgccacctctgacttgagcgtcgatttttgtgatgctcgtcaggggggcggagcctatggaaaaacgccagcaacgcggcctttttacggttcctggccttttgctgg

SEQ ID NO: 5 - DNA, 7402 bp, Artificial
  Synthetic
agacttagggaccctgcggccgccattaattcctaatttttgttgacactctatcattgatagagttattttaccactccctatcagtgatagagaaaagtgaaatgaatagaccggccgctgagaaaaagcgaagcggcactgctctttaacaatttatcagacaatctgtgtgggcactcgaagatacggattcttaacgtcgcaagacgaaaaatgaataccaagtctcaagagtgaacacgtaattcattacgaagtttaattctttgagcgtcaaacttttaaactgaagagtttgatcatggctcagattgaacgctggcggcaggcctaacacatgcaagtcgagcggtaacaggagaagcttgcttcttgctgacgagcggcggacgggtgagtaatacttgggtatctgcccgatagtgggggacaacacggggaaactcgtgctaataccgcatacgtcctacgggagaaagcaggcttaggcttgcgctatcggatgagcccaagtcggattagctagttggtgaggtaaaggctcaccaaggcgacgatccgtaactggtctgagaggatgatcagtcacaccgggactgagacacggcccggactcctacgggaggcagcagtggggaatattggacaatgggggcaaccctgatccagccatgccgcgtgtgtgaagaaggccttagggttgtaaagcactttcagtgaggaggaaaagttagtggttaatacccactagccgtgacgttactcacagaagaagcaccggcaaactccgtgccagcagccgcggtaatacggagggtgcgagcgttaatcggaattactgggcgtaaagcgcgcgtaggcggtttgttaagccggttgtgaaagccctaggctcaacctaggaactgcacccggaactggcaagctagagtacagtagaggaaggtggaattccacgtgtagcggtgaaatgcgtagatatgtggaggaacatcagtggcgaaggcggccttctggactgatactgacgctgaggtgcgaaagcgtggggagcaaacaggattagataccctggtagtccacgccgtaaacgatgtcaactagttgttggaacccttgaggttttagtaacgcagctaacgcattaagttgaccgcctggggagtacggccgcaaggttaaaactcaaatgaattgacgggggcccgcacaagcggtggagcatgtggtttaattcgatgcaacgcgaagaaccttacctactcttgacatccagagaatttgctagagatagcttagtgccttcgggaactctgagacaggtgctgcatggctgtcgtcagctcgtgttgtgaaatgttgggttaagtcccgtaacgagcgcaacccctatccttatttgccagcgagttaagtcgggaactctaaggagactgccggtgacaaaccggaggaaggtggggatgacgtcaagtcatcatggcccttacgagtagggctacacacgtgctacaatggttggtacagcaggttgctaacccgcgagggggcgctaatccgtcaaaaccgatcgtagtccggatcgcagtctgcaactcgactgcgtgaagtcggaatcgctagtaatcgcggatcagaatgccgcggtgaatacgttcccgggccttgtacacaccgcccgtcacaccatgggagttgattgcaccagaagtagctagcttaaccttcgggagggcggttaccacggtgtggttaatgactggggtgaagtcgtaacaaggtagccgtaggggaacctgcggctggatcatgtggttaccttaaagaagcgtactttgtagtgctcacacagattgtctgatagaaagtgaaaagcaaggcgtttacgcgttgggagtgaggctgaagagaataaggccgttcgctttctattaatgaaagctcaccctacacgaaaatatcacgcaacgcgtgataagcaattttcgtgtccccttcgtctagaggcccaggacaccgccctttcacggcggtaacaggggttcgaatcccctaggggacgccacttgctggtttgtgagtgaaagtcgccgaccttaatatctcaaaactcatcttcgggtgatgtttgagatatttgctctttaaaaatctggatcaagctgaaaattgaaacactgaacaacgagagttgttcgtgagtctctcaaattttcgcaacacgatgatgaatcgaaagaaacatcttcgggttgtgaggtcaagtgactaagcgcatacggtggatgcctaggcagtcagaggcgatgaaagacgttgtagcctgcgataagcttcggggaggtggcaaacaacctttgatccggagatttctgaatggggaaacccacccgccataaggcgggtatctataactgaatacataggttatagaggcaaaccgggagaactgaaacatctaagtaacccgaggaaaagaaatcaattgagattcccacagtagcggcgagcgacctgggatcagcccttaagtcagtttagtgttagtagaaggctctggaaagtgccgccctagcaggtgatagccctgtatacgaaaatgctttactggtgaaaacgagtaggacgggacacgagaaatcctgtctgaagatggggggaccatcctccaaggctaaatactcctgactgaccgatagtgaaccagtaccgtgagggaaaggcgaaaagaacccctgttaggggagtgaaatagatcctgaaaccgtatgcgtacaagcagtcggagcagacttgttctgtgacggcgtaccttttgtataatgggtcagcgacttattttcagtggcgaggttaaccgtataggggagccgtagagaaatcgagtcttaatagggcgtgcagtcgctgggaatagacccgaaaccgggcgatctacccatgagcaggttgaaggttgagtaacatcaactggaggaccgaacccacgtatgttgaaaaatgcggggatgacttgtgggtcggagtgaaaggctaatcaagctcggagatagctggttctcctcgaaagctatttaggtagcgcctcgtgtatcaccaccggaggtagagcactgtttgggctagggggtcatcccgacttaccaaccccatgcaaactccgaataccggtgagtgcaagcacgggagacacacggcgggtgctaacgtccgtcgtggaaagggaaacaacccagaccgtcagctaaggccccaaaatcctgattaagtggaaaacgatgtgggaaggcatagacagctaggaggttggcttagaagcagccatcctttaaagaaagcgtaatagctcactagtcgagtcggcctgcgcggaagatttaacggggctcaaatcaggtgccgaagctacgggttcattttaaaatgagcggtagaggagcgttgtgtaagccgtcgaaggtgtgttgagaagcatgctggaggtatcacaagtgcgaatgctgacataagtaacgataaggggtgtgaaaaacacccccgccggaagaccaaggtttcctatcccatgctaatcagggtagggtgagtcggcacctaaggcgaggctgaaaagcgtagtcgatggaaagcaggttaatattcctgcacttgttattgctgcgatgggaggacggagaaggctaggtgagccaggcgttggttgtcctggtgaaagtgcgtaggtggtggttttaggcaaatccggaaccacacacaccgagacacgagaggaagaggatcttcggagaatcgaactcattgatgccacgcttccaggaaaagtctctaagcttcaggtaataacaaaccgtaccccaaaccgacacaggtggtcaggtcgagaagaccaaggcgcttgagagaactcgggtgaaggaactaggcaaaatggtgccgtaacttcgggagaaggcacaccgacgcgtaggtgacgttaacactaaccaagctgaagtcggtcgaagataccaggcccctgcaactgtttattaaaaacacaggactctgcaaacacgtaagtggacgtatagggtctgacgcctgcccggtgccggaaggttaattgatggggttagcgtaagcgaagctcttgatcgaagccccggtaaacggcggccgtaactataacggtcctaaggtagcgaaattccttgtcgggtaagttccgacctgcacgaatggcgtaatgatgggggcgctgtctccacccgagactcagtgaaattgaaatcgccgtgaagatgcggtgtatccgcggctagacggaaagaccccgtgaacctttactatagcttcacactggactttgatattgcttgtgtaggatagctgggagactaagaaccatcgacgctagtcggtgcggagtcaaccttgaaataccagcctggcaatcttgaggttctaacctaggtccattatctggatcggggaccgtgtgtggtgggtagtttgactggggcggtctcctcctaaagagtaacggaggagcacaaaggtaccctcaggctggtcggaaatcagtcaatgagtgcaagagcataagggtgcttgactgcgagacagacacgtcgagcaggtacgaaagtaggttctagtgatccggtggttctgtatggaagggccatcgctcaacggataaaaggtactccggggataacaggctgataccgcccaagagttcacatcgacggcggtgtttggcacctcgatgtcggctcatcacatcctggggctgaagtcggtcccaagggtatggctgttcgccatttaaagtggtacgcgagctgggtttagaacgtcgtgagacagttcggtccctatctgccgtggacgttggagacttgagaagagctgctcctagtacgagaggaccggagtggacgaaccgctggtgtttgggttgtcatgccaatggcactgcccagtagctacgttcggacaggataaccgctgaaagcatctaagcgggaagcccccttcaagattaggtctccctgagagcttgactctcctaaagggcccttgaagactacaaggttgataggttgggtgtggaagtgcagcaatgcattgagctaaccaatactaatgacccgtgaggcttgaccatacaacgccgaagctgttttggcggatgagagaagattttcagcctgatacagattaaatcagaacgcagaagcggtctgataaaacagaatttagcctgacgaccatagcaagtgggaaccacctgataccttgccgaactcagaagtgaaaccgctcagcgccgatgatagtgtggggtctccccatgtgaaagtaggtcatcgtcaggcgccaaataaaacgaaaggctcagtcgaaagactgggcctttcgttttatctgttgtttgtcggtgaacgctctcctgagtaggacaaatccgccgggagcggatttgaacgttgcgaagcaacggcccggagggtggcgggcaggacgcccgccataaactgccaggcatcaaattaagcagaaggccatcctgacggatggcctttttgcgtttctacaaactcttcctgtcgtcatatctacaagccggcgcgccgggaaatgtgcgcggaacccctatttgtttatttttctaaatacattcaaatatgtatccgctcatgagacaataaccctgataaatgcttcaataatattgaaaaaggaagagtatgagtattcaacatttccgtgtcgcccttattcccttttttgcggcattttgccttcctgtttttgctcacccagaaacgctggtgaaagtaaaagatgctgaagatcagttgggtgcacgagtgggttacatcgaactggatctcaacagcggtaagatccttgagagttttcgccccgaagaacgttttccaatgatgagcacttttaaagttctgctatgtggcgcggtattatcccgtgttgacgccgggcaagagcaactcggtcgccgcatacactattctcagaatgacttggttgagtactcaccagtcacagaaaagcatcttacggatggcatgacagtaagagaattatgcagtgctgcaataaccatgagtgataacactgcggccaacttacttctgacaacgatcggaggaccgaaggagctaaccgcttttttgcacaacatgggggatcatgtaactcgccttgatcgttgggaaccggagctgaatgaagccataccaaacgacgagcgtgacaccacgatgcctgcagcaatggcaacaacgttgcgcaaactattaactggcgaactacttactctagcttcccggcaacaattaatagactggatggaggcggataaagttgcaggaccacttctgcgctcggcccttccggctagctggtttattgctgataaatctggagccggtgagcgtgggtctcgcggtatcattgcagcactggggccagatggtaagccctcccgtatcgtagttatctacacgacggggagtcaggcaactatggatgaacgaaatagacagatcgctgagataggtgcctcactgattaagcattggtaactgcagaccaagtttactcatatatactttagattgatttaaaacttcatttttaatttaaaaggatctaggtgaagatcctttttgataatctcatgaccaaaatcccttaacgtgagttttcgttccactgagcgtcagaccccgtagaaaagatcaaaggatcttcttgagatcctttttttctgcgcgtaatctgctgcttgcaaacaaaaaaaccaccgctaccagcggtggtttgtttgccggatcaagagctaccaactctttttccgaaggtaactggcttcagcagagcgcagataccaaatactgtccttctagtgtagccgtagttaggccaccacttcaagaactctgtagcaccgcctacatacctcgctctgctaatcctgttaccagtggctgctgccagtggcgataagtcgtgtcttaccgggttggactcaagacgatagttaccggataaggcgcagcggtcgggctgaacggggggttcgtgcacacagcccagcttggagcgaacgacctacaccgaactgagatacctacagcgtgagctatgagaaagcgccacgcttcccgaagggagaaaggcggacaggtatccggtaagcggcagggtcggaacaggagagcgcacgagggagcttccagggggaaacgcctggtatctttatagtcctgtcgggtttcgccacctctgacttgagcgtcgatttttgtgatgctcgtcaggggggcggagcctatggaaaaacgccagcaacgcggcctttttacggttcctggccttttgctgg

SEQ ID NO: 6 - DNA, 7450 bp, Artificial
  Synthetic
agacttagggaccctgcggccgccattaattcctaatttttgttgacactctatcattgatagagttattttaccactccctatcagtgatagagaaaagtgaaatgaatagaccggccgctgagaaaaagcgaagcggcactgctctttaacaatttatcagacaatctgtgtgggcactcgaagatacggattcttaacgtcgcaagacgaaaaatgaataccaagtctcaagagtgaacacgtaattcattacgaagtttaattctttgagcgtcaaacttttggagagtttgatcctggctcagaacgaacgctggcggcgtgcctaacacatgcaagtcgaacggactttaagacttcggttttaaagttagtggcgcacgggtgagtaacgcgtggatatctgcctatcagtgggggacaactacaggaaactgtagctaataccgcatacgctgtacgcaggaaagcgggggatcttcggacctcgcgctgatagatgagtccgcgtctgattagctagttggtggggtaaaggcctaccaaggcgatgatcagtaactggtttgagaggatgatcagtcacactggaactgagacacggtccagactcctacgggaggcagcagtggggaatattgcacaatgggggaaaccctgatgcagcgacgccgcgtgcgggaagaaggccttcgggttgtaaaccgctttcaattgggaagaagagatgagtactaatactgctctgatttgacggtacctttagaagaagcaccggctaatttcgtgccagcagccgcggtaatacgaaaggtgcaagcgttgttcggatttactgggcgtaaagagatcgtaggtggtttgttaagtcggatgtgaaatcccagggctcaaccctggaactgcattcgatactggcagactagagtttgggaggggtaagcggaattccgtgtgtagcagtgaaatgcgtagatatacggaggaacacctgaggcgaaggcggcttactggaccaatactgacactgaggatcgaaagcgtgggtagcaaacaggattagataccctggtagtccacgccctaaacgatgtcaactagccgtagcgggtatcgacccctgctgtggcgaagctaacgcgataagttgaccgcctggggagtacggtcgcaagattaaaactcaaaggaattgacgggggcccgcacaagcggtggagcatgtggtttaattcgacgcaacgcgaagaaccttacctgggtttgacatcctaagaatactttagagatagagtagtgccttcgggagcttagagacaggtgctgcatggctgtcgtcagctcgtgtcgtgagatgttgggttaagtcccgcaacgagcgcaacccctatcgttagttgccatcatttagttgggcactctagcgagactgccggtgacaaaccggaggaaggtggggacgacgtcaagtcatcatggcccttatgtccagggctacacacgtgctacaatggcgactacaacaagttgcgaacccgcgagggggagccaatcttataaaagtcgtctcagttcggattggagtctgcaactcgactccatgaagttggaatcgctagtaatcgcggatcagcatgccgcggtgaatacgttcccgggccttgtacacaccgcccgtcacaccatgggaattggttgcaccagaagccgccgggctaaccttcgggaggcaggcgtctacggtgtggtcggtaactggggtgaagtcgtaacaaggtatccctaccggaaggtggggatggatcatgtggtttccttaaagaagcgtactttgtagtgctcacacagattgtctgatagaaagtgaaaagcaaggcgtttacgcgttgggagtgaggctgaagagaataaggccgttcgctttctattaatgaaagctcaccctacacgaaaatatcacgcaacgcgtgataagcaattttcgtgtccccttcgtctagaggcccaggacaccgccctttcacggcggtaacaggggttcgaatcccctaggggacgccacttgctggtttgtgagtgaaagtcgccgaccttaatatctcaaaactcatcttcgggtgatgtttgagatatttgctctttaaaaatctggatcaagctgaaaattgaaacactgaacaacgagagttgttcgtgagtctctcaaattttcgcaacacgatgatgaatcgaaagaaacatcttcgggttgtgaggttaagtgaataagggtccatgggggatgccttggcgctgagcggcgatgaaagacgtgactacctgcgaaaagtttcggggagctggtaagtgagctttgatccggaaatatctgaatggggaaacccggcagtttcgactgtcacctgcagctgaatacataggctgtatggagcgaacgcggagaattgaaacatcttagtacccgcaggaaaagaaatctatgagattccctgagtagcggcgagcgaaacgggaaaaggccaaaccggtaaatttatttgccggggttgtaggactacaatatggtattgataagagatagcagaacactctggaaagtgtggccatagtgggtgatagccccgtatgcgaaatttcgagtcaacctagtagcatcctgagtaggacgggacacgagaaaccttgtctgaatccggggggaccaccctccaagcctaaatacgtctcagcgaccgatagtgaaccagtaccgtgagggaaaggtgaaaagtaccccgttgaggggagtgaaatagacctgaaaccatggacctacaagcagttggagccctatgtcttcggacagggtgacagcgtaccttttgtataatgggccaacgacttatggctcagtggcaaggttaagttattaaacgaagccgtagcgaaagcgagtcttaatagggcgcacatagtcactgggcatagacccgaagccaggcgagctatttatgagcaggttgaagcggtggtaagacatcgtggaggaccgaacccacattggctgaagacaatggggatgacttgtgaataggggtgaaaggccaatcaagcctggcaatagctggttctctccgaaagctatttaggtagcgcctcatgtatcaccaccgggggtagagcactggatgggctagggggtctcacgacttaccaaacctaaccaaactccgaataccggtgagtgcaatcatgggagacagactttggatgctaacgtccatggtcaagagggaaacaacccagaccgtcagctaaggtccccaaatgtatgttaagtggtaaacgaagtggaaaggcaataacagccaggaggttagcttagaagcagctatcctttaaagaaagcgtaatagctcactggtcgagtcggtctgcgcggaagatataacggggctcaaacatactaccgaagctacgggtgcagtttactgcacggtaggagagcgttctgtaagcctgtgaagcgatactgtaaggagtcgtggaggtatcagaagtgagaatgttggcataagtagcgataaaacgggtgaaaaacccgttcaccgaaagcccaaggtttcctgcaccatgctaatcagggcagggttagtcggcccctaaggcgaggcagaaatgcgtagtcgatgggaaacaggttaatattcctgtaccgactttagatgcgatggagggacggagaaaggtagctgatccgggcgatggttgtcccggttcaagcgcgtagggagagagttttggcaaatccggactctcattatcctgagacgttatgacgtgctcttacttcggtttgagcgaagtcagtgatcctatgcttccaagaaaatcttctaagcttcagtctaaagttgaccgtaccgtaaaccgacacaggtaggcgaggcgagaagcctaaggtgcttgagataactctggttaaggaactcggcaaattggccccgtaacttcgggagaaggggtgccctttttatgtgaagcgacttgctcgtggagcagaagggggttgcagtgaccagggggtagcgactgtttactaaaaacacagcactctgctaagccgtaaggcgatgtatagggtgtgacgcctgcccggtgctggaaggttaagaggtggggttagcgcaagcgaagctctgaatcgaagccccagtaaacggcggccgtaactataacggtcctaaggtagcgaaattccttgtcgggtaagttccgacctgcacgaatggcgtaacgacttccccactgtctcaaccagagactcagcgaaattgaactcgcagtgaagatgctgcgttcccgcggctagacggaaagaccccgtgcacctttactacagcttgacattggatctaggtatattttgtgcaggataggtgggaggctttgatatggtgacgccagttaccatggagccacccttgagataccaccctgaatatgcttgggttctaaccaaggcccgttatccgggtttgggacattgtctggtgggtagtttgactggggcggtcgcctcctaaagagtaacggaggcgcgcgaagtttcactcaggttggtcggaaatcaaccattgagcgcaagagtataagtgagactgactgcgagactgacaagtcgagcagggacgaaagtcggttctagtgatccggtggttccgagtggaagggccatcgctcaacggataaaaggtacgccggggataacaggctgattccccccaagagttcatatcgacgggggagtttggcacctcgatgtcggctcatcacatcctggggctggagcaggtcccaagggttcggctgttcgccgattaaagtggtacgtgagctgggtttagaacgtcgtgagacagttcggtccctatctaccgtgggcgttggagaattgagaggatctgtccttagtacgagaggaccgggatggacaaacctctggtgttcctgttgttctgccaagagcattgcagggtagctacgtttggaacggataaccgctgaaggcatctaagcgggaagccggcctcaagataaattctcccggagctttaagctccctgaagggccgtggaagactaccacgttgataggctgggtgtggaagtgcagcaatgcatggagctgaccagtactaattgcccgtgcggcttaaccatacaacgccgaagctgttttggcggatgagagaagattttcagcctgatacagattaaatcagaacgcagaagcggtctgataaaacagaatttttcctggtgttcatagcaaagaggaaacgcctgatcccatcccgaactcagaagctaagctcttttgcgccaatggtactgtagcgttcgttacgggagagtaggtcaatgccaggaatcaaataaaacgaaaggctcagtcgaaagactgggcctttcgttttatctgttgtttgtcggtgaacgctctcctgagtaggacaaatccgccgggagcggatttgaacgttgcgaagcaacggcccggagggtggcgggcaggacgcccgccataaactgccaggcatcaaattaagcagaaggccatcctgacggatggcctttttgcgtttctacaaactcttcctgtcgtcatatctacaagccggcgcgccgggaaatgtgcgcggaacccctatttgtttatttttctaaatacattcaaatatgtatccgctcatgagacaataaccctgataaatgcttcaataatattgaaaaaggaagagtatgagtattcaacatttccgtgtcgcccttattcccttttttgcggcattttgccttcctgtttttgctcacccagaaacgctggtgaaagtaaaagatgctgaagatcagttgggtgcacgagtgggttacatcgaactggatctcaacagcggtaagatccttgagagttttcgccccgaagaacgttttccaatgatgagcacttttaaagttctgctatgtggcgcggtattatcccgtgttgacgccgggcaagagcaactcggtcgccgcatacactattctcagaatgacttggttgagtactcaccagtcacagaaaagcatcttacggatggcatgacagtaagagaattatgcagtgctgcaataaccatgagtgataacactgcggccaacttacttctgacaacgatcggaggaccgaaggagctaaccgcttttttgcacaacatgggggatcatgtaactcgccttgatcgttgggaaccggagctgaatgaagccataccaaacgacgagcgtgacaccacgatgcctgcagcaatggcaacaacgttgcgcaaactattaactggcgaactacttactctagcttcccggcaacaattaatagactggatggaggcggataaagttgcaggaccacttctgcgctcggcccttccggctagctggtttattgctgataaatctggagccggtgagcgtgggtctcgcggtatcattgcagcactggggccagatggtaagccctcccgtatcgtagttatctacacgacggggagtcaggcaactatggatgaacgaaatagacagatcgctgagataggtgcctcactgattaagcattggtaactgcagaccaagtttactcatatatactttagattgatttaaaacttcatttttaatttaaaaggatctaggtgaagatcctttttgataatctcatgaccaaaatcccttaacgtgagttttcgttccactgagcgtcagaccccgtagaaaagatcaaaggatcttcttgagatcctttttttctgcgcgtaatctgctgcttgcaaacaaaaaaaccaccgctaccagcggtggtttgtttgccggatcaagagctaccaactctttttccgaaggtaactggcttcagcagagcgcagataccaaatactgtccttctagtgtagccgtagttaggccaccacttcaagaactctgtagcaccgcctacatacctcgctctgctaatcctgttaccagtggctgctgccagtggcgataagtcgtgtcttaccgggttggactcaagacgatagttaccggataaggcgcagcggtcgggctgaacggggggttcgtgcacacagcccagcttggagcgaacgacctacaccgaactgagatacctacagcgtgagctatgagaaagcgccacgcttcccgaagggagaaaggcggacaggtatccggtaagcggcagggtcggaacaggagagcgcacgagggagcttccagggggaaacgcctggtatctttatagtcctgtcgggtttcgccacctctgacttgagcgtcgatttttgtgatgctcgtcaggggggcggagcctatggaaaaacgccagcaacgcggcctttttacggttcctggccttttgctgg

SEQ ID NO: 7 - DNA, 7403 bp, Artificial
  Synthetic
agacttagggaccctgcggccgccattaattcctaatttttgttgacactctatcattgatagagttattttaccactccctatcagtgatagagaaaagtgaaatgaatagaccggccgctgagaaaaagcgaagcggcactgctctttaacaatttatcagacaatctgtgtgggcactcgaagatacggattcttaacgtcgcaagacgaaaaatgaataccaagtctcaagagtgaacacgtaattcattacgaagtttaattctttgagcgtcaaacttttgaacataagagtttgatcctggctcagattgaacgctggcggcatgctttacacatgcaagtcggacggcagcacagggaagcttgcttctcgggtggcgagtggcgaacgggtgagtaacatatcggaacgtaccgggtagcgggggataactgatcgaaagatcagctaataccgcatacgtcttgagagggaaagcaggggaccttcgggccttgcgctatccgagcggccgatatctgattagctggttggcggggtaaaggcccaccaaggcgacgatcagtagcgggtctgagaggatgatccgccacactgggactgagacacggcccagactcctacgggaggcagcagtggggaattttggacaatgggcgcaagcctgatccagccatgccgcgtgtctgaagaaggccttcgggttgtaaaggacttttgtcagggaagaaaaggccgttgccaatatcggcggccgatgacggtacctgaagaataagcaccggctaactacgtgccagcagccgcggtaatacgtagggtgcgagcgttaatcggaattactgggcgtaaagcgggcgcagacggttacttaagcaggatgtgaaatccccgggctcaacccgggaactgcgttctgaactgggtgactcgagtgtgtcagagggaggtggaattccacgtgtagcagtgaaatgcgtagagatgtggaggaataccgatggcgaaggcagcctcctgggataacactgacgttcatgtccgaaagcgtgggtagcaaacaggattagataccctggtagtccacgccctaaacgatgtcaattagctgttgggcaacttgattgcttggtagcgtagctaacgcgtgaaattgaccgcctggggagtacggtcgcaagattaaaactcaaaggaattgacggggacccgcacaagcggtggatgatgtggattaattcgatgcaacgcgaagaaccttacctggttttgacatgtgcggaatcctccggagacggaggagtgccttcgggagccgtaacacaggtgctgcatggctgtcgtcagctcgtgtcgtgagatgttgggttaagtcccgcaacgagcgcaacccttgtcattagttgccatcattcggttgggcactctaatgagactgccggtgacaagccggaggaaggtggggatgacgtcaagtcctcatggcccttatgaccagggcttcacacgtcatacaatggtcggtacagagggtagccaagccgcgaggcggagccaatctcacaaaaccgatcgtagtccggattgcactctgcaactcgagtgcatgaagtcggaatcgctagtaatcgcaggtcagcatactgcggtgaatacgttcccgggtcttgtacacaccgcccgtcacaccatgggagtgggggataccagaagtaggtagggtaaccgcaaggagtccgcttaccacggtatgcttcatgactggggtgaagtcgtaacaaggtagccgtaggggaacctgcggctggatcatgtggtttccttaaagaagcgtactttgtagtgctcacacagattgtctgatagaaagtgaaaagcaaggcgtttacgcgttgggagtgaggctgaagagaataaggccgttcgctttctattaatgaaagctcaccctacacgaaaatatcacgcaacgcgtgataagcaattttcgtgtccccttcgtctagaggcccaggacaccgccctttcacggcggtaacaggggttcgaatcccctaggggacgccacttgctggtttgtgagtgaaagtcgccgaccttaatatctcaaaactcatcttcgggtgatgtttgagatatttgctctttaaaaatctggatcaagctgaaaattgaaacactgaacaacgagagttgttcgtgagtctctcaaattttcgcaacacgatgatgaatcgaaagaaacatcttcgggttgtgaagtcaagtgaataagtgcatcaggcggatgccttggcgatgataggcgacgaaggacgtgtaagcctgcgaaaagcgcgggggagctggcaataaagctatgattccgcgatgtccgaatggggaaacccactgcattctgtgcagtatcctaagttgaatacataggcttagagaagcgaacccggagaactgaaccatctaagtacccggaggaaaagaaatcaaccgagattccgcaagtagtggcgagcgaacgcggaggagcctgtacgtaataactgtcgagatagaagaacaagctgggaagcttgaccatagcgggtgacagtcccgtattcgaaatctcaacagcggtactaagcgtacgaaaagtagggcgggacacgtgaaatcctgtctgaatatggggggaccatcctccaaggctaaatactcatcatcgaccgatagtgaaccagtaccgtgagggaaaggcgaaaagaaccccgggaggggagtgaaacagaacctgaaacctgatgcatacaaacagtgggagcgccctagtggtgtgactgcgtaccttttgtataatgggtcaacgacttacattcagtagcgagcttaaccggataggggaggcgtagggaaaccgagtcttaatagggcgatgagttgctgggtgtagacccgaaaccgagtgatctatccatggtcaggttgaaggtgccgtaacaggtactggaggaccgaacccacgcatgttgcaaaatgcggggatgagctgtgggtaggggtgaaaggctaaacaaactcggagatagctggttctccccgaaaactatttaggtagtgcctcgagcaagacactgatgggggtaaagcactgttatggctagggggttattgcaacttaccaacccatggcaaactcagaataccatcaagtggttcctcgggagacagacagcgggtgctaacgtccgttgtcaagagggaaacaacccagaccgccggctaaggtcccaaatgatagattaagtggtaaacgaagtgggaaggcacagacagccaggatgttggcttagaagcagccatcatttaaagaaagcgtaatagctcactggtcgagtcgtcctgcgcggaagatgtaacggggctcaaatctataaccgaagctgcggatgccggtttaccggcatggtaggggagcgttctgtaggctgatgaaggtgcattgtaaagtgtgctggaggtatcagaagtgcgaatgttgacatgagtagcgataaagcgggtgaaaagcccgctcgccgaaagcccaaggtttcctacgcaacgttcatcggcgtagggtaagtcggcccctaaggcgaggcagaaatgcgtagtcgatgggaaacaggttaatattcctgtacttgattcaaatgcgatgtggggacggagaaggttaggttggcaagctgttggaatagcttgtttaagccggtaggtggaagacttaggcaaatccgggttttcttaacaccgagaagtgatgacgagtgtctacggacacgaagcaaccgataccacgcttccaggaaaagccactaagcttcagtttgaatcgaaccgtaccgcaaaccgacacaggtgggcaggatgagaattctaaggcgcttgagagaactcgggagaaggaactcggcaaattgataccgtaacttcgggagaaggtatgccctctaaggttaaggacttgctccgtaagccccggagggtcgcagagaataggtggctgcgactgtttattaaaaacacagcactctgccaacacgaaagtggacgtatagggtgtgacgcctgcccggtgccggaaggttaattgaagatgtgcaagcatcggatcgaagccccggtaaacggcggccgtaactataacggtcctaaggtagcgaaattccttgtcgggtaagttccgacccgcacgaatggcgtaacgatggccacactgtctcctcccgagactcagcgaagttgaagtggttgtgaagatgcaatctacccgctgctagacggaaagaccccgtgaacctttactgtagctttgcattggactttgaagtcacttgtgtaggataggtgggaggcttggaagcagagacgccagtctctgtggagtcgtccttgaaataccaccctggtgtctttgaggttctaacccagacccgtcatccgggtcggggaccgtgcatggtaggcagtttgactggggcggtctcctcccaaagcgtaacggaggagttcgaaggttacctaggtccggtcggaaatcggactgatagtgcaatggcaaaaggtagcttaactgcgagaccgacaagtcgggcaggtgcgaaagcaggacatagtgatccggtggttctgtatggaagggccatcgctcaacggataaaaggtactccggggataacaggctgattccgcccaagagttcatatcgacggcggagtttggcacctcgatgtcggctcatcacatcctggggctgtagtcggtcccaagggtatggctgttcgccatttaaagtggtacgtgagctgggtttaaaacgtcgtgagacagtttggtccctatctgcagtgggcgttggaagtttgacgggggctgctcctagtacgagaggaccggagtggacgaacctctggtgtaccggttgtaacgccagttgcatagccgggtagctaagttcggaagagataagcgctgaaagcatctaagcgcgaaactcgcctgaagatgagacttcccttgcggtttaaccgcactaaagggtcgttcgagaccaggacgttgataggtggggtgtggaagcgcggtaacgcgtgaagctaacccatactaattgcccgtgaggcttgactctacaacgccgaagctgttttggcggatgagagaagattttcagcctgatacagattaaatcagaacgcagaagcggtctgataaaacagaatttgtttggcggccatagcgagttggtcccacgccttcccatcccgaacaggaccgtgaaacgactcagcgccgatgatagtgtggttcttccatgcgaaagtaggtcactgccaaacaccaaataaaacgaaaggctcagtcgaaagactgggcttttcgttttatctgttgtttgtcggtgaacgctctcctgagtaggacaaatccgccgggagcggatttgaacgttgcgaagcaacggcccggagggtggcgggcaggacgcccgccataaactgccaggcatcaaattaagcagaaggccatcctgacggatggcctttttgcgtttctacaaactcttcctgtcgtcatatctacaagccggcgcgccgggaaatgtgcgcggaacccctatttgtttatttttctaaatacattcaaatatgtatccgctcatgagacaataaccctgataaatgcttcaataatattgaaaaaggaagagtatgagtattcaacatttccgtgtcgcccttattcccttttttgcggcattttgccttcctgtttttgctcacccagaaacgctggtgaaagtaaaagatgctgaagatcagttgggtgcacgagtgggttacatcgaactggatctcaacagcggtaagatccttgagagttttcgccccgaagaacgttttccaatgatgagcacttttaaagttctgctatgtggcgcggtattatcccgtgttgacgccgggcaagagcaactcggtcgccgcatacactattctcagaatgacttggttgagtactcaccagtcacagaaaagcatcttacggatggcatgacagtaagagaattatgcagtgctgcaataaccatgagtgataacactgcggccaacttacttctgacaacgatcggaggaccgaaggagctaaccgcttttttgcacaacatgggggatcatgtaactcgccttgatcgttgggaaccggagctgaatgaagccataccaaacgacgagcgtgacaccacgatgcctgcagcaatggcaacaacgttgcgcaaactattaactggcgaactacttactctagcttcccggcaacaattaatagactggatggaggcggataaagttgcaggaccacttctgcgctcggcccttccggctagctggtttattgctgataaatctggagccggtgagcgtgggtctcgcggtatcattgcagcactggggccagatggtaagccctcccgtatcgtagttatctacacgacggggagtcaggcaactatggatgaacgaaatagacagatcgctgagataggtgcctcactgattaagcattggtaactgcagaccaagtttactcatatatactttagattgatttaaaacttcatttttaatttaaaaggatctaggtgaagatcctttttgataatctcatgaccaaaatcccttaacgtgagttttcgttccactgagcgtcagaccccgtagaaaagatcaaaggatcttcttgagatcctttttttctgcgcgtaatctgctgcttgcaaacaaaaaaaccaccgctaccagcggtggtttgtttgccggatcaagagctaccaactctttttccgaaggtaactggcttcagcagagcgcagataccaaatactgtccttctagtgtagccgtagttaggccaccacttcaagaactctgtagcaccgcctacatacctcgctctgctaatcctgttaccagtggctgctgccagtggcgataagtcgtgtcttaccgggttggactcaagacgatagttaccggataaggcgcagcggtcgggctgaacggggggttcgtgcacacagcccagcttggagcgaacgacctacaccgaactgagatacctacagcgtgagctatgagaaagcgccacgcttcccgaagggagaaaggcggacaggtatccggtaagcggcagggtcggaacaggagagcgcacgagggagcttccagggggaaacgcctggtatctttatagtcctgtcgggtttcgccacctctgacttgagcgtcgatttttgtgatgctcgtcaggggggcggagcctatggaaaaacgccagcaacgcggcctttttacggttcctggccttttgctgg

SEQ ID NO: 8 - DNA, 7383 bp, Artificial
  Synthetic
agacttagggaccctgcggccgccattaattcctaatttttgttgacactctatcattgatagagttattttaccactccctatcagtgatagagaaaagtgaaatgaatagaccggccgctgagaaaaagcgaagcggcactgctctttaacaatttatcagacaatctgtgtgggcactcgaagatacggattcttaacgtcgcaagacgaaaaatgaataccaagtctcaagagtgaacacgtaattcattacgaagtttaattctttgagcgtcaaacttttgaactgaagagtttgatcctggctcagattgaacgctggcgggatgctttacacatgcaagtcggacggcagcacgggcttcggcctggtggcgagtggcgaacgggtgagtaatgtatcggaacgtgcccagtagcgggggataactacgcgaaagcgtggctaataccgcatacgccctacgggggaaagcgggggaccttcgggcctcgcactattggagcggccgatatcggattagctagttggtggggtaacggcctaccaaggcgacgatccgtagctggtttgagaggacgaccagccacactgggactgagacacggcccagactcctacgggaggcagcagtggggaattttggacaatgggggcaaccctgatccagccatcccgcgtgtgcgatgaaggccttcgggttgtaaagcacttttggcaggaaagaaacggcacgggctaatatcctgtgcaactgacggtacctgcagaataagcaccggctaactacgtgccagcagccgcggtaatacgtagggtgcaagcgttaatcggaattactgggcgtaaagcgtgcgcaggcggttcggaaagaaagatgtgaaatcccagggcttaaccttggaactgcatttttaactaccgggctagagtgtgtcagagggaggtggaattccgcgtgtagcagtgaaatgcgtagatatgcggaggaacaccgatggcgaaggcagcctcctgggataacactgacgctcatgcacgaaagtgtggggagcaaacaggattagataccctggtagtccacgccctaaacgatgtcaactagctgttggggccttcgggccttggtagcgcagctaacgcgtgaagttgaccgcctggggagtacggtcgcaagattaaaactcaaaggaattgacggggacccgcacaagcggtggatgatgtggattaattcgatgcaacgcgaaaaaccttacctacccttgacatgtctggaatcccgaagagatttgggagtgctcgcaagagaaccggaacacaggtgctgcatggctgtcgtcagctcgtgtcgtgagatgttgggttaagtcccgcaacgagcgcaacccttgtcattagttgctacgaaagggcactctaatgagactgccggtgacaaaccggaggaaggtggggatgacgtcaagtcctcatggcccttatgggtagggcttcacacgtcatacaatggtcgggacagagggttgccaacccgcgagggggagccaatcccagaaacccggtcgtagtccggatcgcagtctgcaactcgactgcgtgaagtcggaatcgctagtaatcgcggatcagcatgtcgcggtgaatacgttcccgggtcttgtacacaccgcccgtcacaccatgggagtgggttttaccagaagtagttagcctaaccgcaaggggggcgattaccacggtaggattcatgactggggtgaagtcgtaacaaggtagccgtatcggaaggtgcggctggatcatgtggtttccttaaagaagcgtactttgtagtgctcacacagattgtctgatagaaagtgaaaagcaaggcgtttacgcgttgggagtgaggctgaagagaataaggccgttcgctttctattaatgaaagctcaccctacacgaaaatatcacgcaacgcgtgataagcaattttcgtgtccccttcgtctagaggcccaggacaccgccctttcacggcggtaacaggggttcgaatcccctaggggacgccacttgctggtttgtgagtgaaagtcgccgaccttaatatctcaaaactcatcttcgggtgatgtttgagatatttgctctttaaaaatctggatcaagctgaaaattgaaacactgaacaacgagagttgttcgtgagtctctcaaattttcgcaacacgatgatgaatcgaaagaaacatcttcgggttgtgagatcaagcgactaagtgcatatggtggatgccttggcgatcacaggcgatgaaggacgtagtagcctgcgaaaagctgcggggagctggcaaacaagcattgatccgcagatatccgaatggggaaacccaccgcgcaagcggtatccctggctgaatacataggccagtggaggcgaaccgggtgaactgaaacatctcagtagctcgaggaaaagaaatcaaccgagattccgaaagtagtggcgagcgaaatcggaagagcctttacgatttagcattttgcatagtcgaacggaatggaaagtccggccgtagcaggtgatagccctgtagacgaaatgcagagtgtggaactaggcgtaagagaagtagggcgggacacgtgaaatcctgtctgaagatggggggaccatcctccaaggctaaatactcgtgatcgaccgatagtgaaccagtaccgtgagggaaaggcgaaaagaaccccggaaggggagtgaaatagatcctgaaaccgtatgcatacaaacagtcggagcctctttatggggtgacggcgtaccttttgtataatgggtcagcgacttacattcagtggcgagcttaaccgaatagggaaggcgtagcgaaagcgagtccgaatagggcgtccagtcgctgggtgtagacccgaaaccagatgatctacccatggccaggttgaaggcacggtaacacgtgctggaggaccgaacccactagtgttgaaaaactaggggatgagctgtggataggggtgaaaggctaaacaaatctggaaatagctggttctctccgaaaactatttaggtagtgcctcaagtattactgcagggggtagagcactgttatggctagggggtcatggcgacttaccaaaccatggcaaactccgaatacctgcaagtacagcttgggagacagagcaccgggtgctaacgtccggactcaagagggaaacaacccagaccgccagctaaggtcccgaattatcgctaagtgggaaacgaagtgggaaggcatagacagtcaggaggttggcttagaagcagccaccctttaaagaaagcgtaatagctcactgatcgagtcgtcctgcgcggaagatgtaacggggctaagcgataaaccgaagctgcgggtgtgcacttttagtgcgcgcggtaggagagcgttctgtaagcctgcgaaggtggcttgtaaaggctgctggaggtatcagaagtgcgaatgctgacatgagtagcgataaagggggtgaaaagccccctcgccgtaagtccaaggtttcctgcgcaacgttcatcggcgcagggtgagtcggcccctaaggcgaggcagagatgcgtagctgatgggaagctggttaatattccagcaccgtcgtacagtgcgatggggggacggatcgcggaaggtcatcagggtgttggacgtccctgttgctgcattgaagatggcgcttaggcaaatccgggcgcgagaatcaagggtgtggcacgagcgagcaagtctcgcgaagtgattggaagtggttccaagaaaagcctctaagcttcagctgtacgagaccgtaccgcaaaccgacacaggtggacgggatgaatattccaaggcgcttgagagaactcaggagaaggaactcggcaaattgataccgtaacttcgggagaaggtataccctggtagtgtgaagcgcctgcgcgctgagcatgaaggggtcgcagagaatcggtggctgcgactgtttattaaaaacacagcactctgcaaagacgaaagtcgacgtatagggtgtgacgcctgcccggtgccggaaggttaagtgatggggtgcaagctcttgatcgaagccccggtaaacggcggccgtaactataacggtcctaaggtagcgaaattccttgtcgggtaagttccgacctgcacgaatggcgtaacgatggccacactgtctcctcctgagactcagcgaagttgaagtgtttgtgatgatgcaatctacccgcggctagacggaaagaccccatgaacctttactgtagctttgcattggactgtgaaccggcctgtgtaggataggtgggaggcgcagaactcgagtcgccagattcgagggagccatccttgaaataccaccctggtttgtttgcggttctaaccttggtccgttatccggatcggggacagtgcatggtaggcagtttgactggggcggtctcctcccaaagcgtaacggaggagttcgaaggtacgctaggtacggtcggaaatcgtgctgatagtgcaatggcataagcgtgcttgactgtgagactgacaagtcgaacaggtgcgaaagcaggacatagtgatccggtggttctgaatggaagggccatcgctcaacggataaaaggtactctggggataacaggctgataccgcccaagagttcatatcgacggcggtgtttggcacctcgatgtcggctcatctcatcctggggctgtagccggtcccaagggtatggctgttcgccatttaaagaggtacgtgagctgggtttaaaacgtcgtgagacagtttggtccctatctgccgtgggcgttggatacttgacggagcctgctcctagtacgagaggaccggagtggacgtacctctggtgtaccggttgtcatgccaatggcattgccgggtagctaagtacggaagagataaccgctgaaggcatctaagcgggaaactcgtctgaagattaggtatcccggggactagatccccctgaagggtcgttcgagaccaggacgttgataggtcgggtgtggaagcgcagtaatgcgttaagctaaccgatactaattgcccgtgaggcttgatcctacaacgccgaagctgttttggcggatgagagaagattttcagcctgatacagattaaatcagaacgcagaagcggtctgataaaacagaatttcgcctgacgaccatagcaaggtggtcccactccttcccatcccgaacaggacagtgaaacgccttcgcgccgatgatagtggatgtacatctgtgaaagtaggtcatcgtcaggcttcaaataaaacgaaaggctcagtcgaaagactgggcctttcgttttatctgttgtttgtcggtgaacgctctcctgagtaggacaaatccgccgggagcggatttgaacgttgcgaagcaacggcccggagggtggcgggcaggacgcccgccataaactgccaggcatcaaattaagcagaaggccatcctgacggatggcctttttgcgtttctacaaactcttcctgtcgtcatatctacaagccggcgcgccgggaaatgtgcgcggaacccctatttgtttatttttctaaatacattcaaatatgtatccgctcatgagacaataaccctgataaatgcttcaataatattgaaaaaggaagagtatgagtattcaacatttccgtgtcgcccttattcccttttttgcggcattttgccttcctgtttttgctcacccagaaacgctggtgaaagtaaaagatgctgaagatcagttgggtgcacgagtgggttacatcgaactggatctcaacagcggtaagatccttgagagttttcgccccgaagaacgttttccaatgatgagcacttttaaagttctgctatgtggcgcggtattatcccgtgttgacgccgggcaagagcaactcggtcgccgcatacactattctcagaatgacttggttgagtactcaccagtcacagaaaagcatcttacggatggcatgacagtaagagaattatgcagtgctgcaataaccatgagtgataacactgcggccaacttacttctgacaacgatcggaggaccgaaggagctaaccgcttttttgcacaacatgggggatcatgtaactcgccttgatcgttgggaaccggagctgaatgaagccataccaaacgacgagcgtgacaccacgatgcctgcagcaatggcaacaacgttgcgcaaactattaactggcgaactacttactctagcttcccggcaacaattaatagactggatggaggcggataaagttgcaggaccacttctgcgctcggcccttccggctagctggtttattgctgataaatctggagccggtgagcgtgggtctcgcggtatcattgcagcactggggccagatggtaagccctcccgtatcgtagttatctacacgacggggagtcaggcaactatggatgaacgaaatagacagatcgctgagataggtgcctcactgattaagcattggtaactgcagaccaagtttactcatatatactttagattgatttaaaacttcatttttaatttaaaaggatctaggtgaagatcctttttgataatctcatgaccaaaatcccttaacgtgagttttcgttccactgagcgtcagaccccgtagaaaagatcaaaggatcttcttgagatcctttttttctgcgcgtaatctgctgcttgcaaacaaaaaaaccaccgctaccagcggtggtttgtttgccggatcaagagctaccaactctttttccgaaggtaactggcttcagcagagcgcagataccaaatactgtccttctagtgtagccgtagttaggccaccacttcaagaactctgtagcaccgcctacatacctcgctctgctaatcctgttaccagtggctgctgccagtggcgataagtcgtgtcttaccgggttggactcaagacgatagttaccggataaggcgcagcggtcgggctgaacggggggttcgtgcacacagcccagcttggagcgaacgacctacaccgaactgagatacctacagcgtgagctatgagaaagcgccacgcttcccgaagggagaaaggcggacaggtatccggtaagcggcagggtcggaacaggagagcgcacgagggagcttccagggggaaacgcctggtatctttatagtcctgtcgggtttcgccacctctgacttgagcgtcgatttttgtgatgctcgtcaggggggcggagcctatggaaaaacgccagcaacgcggcctttttacggttcctggccttttgctgg

SEQ ID NO: 9 - DNA, 7277 bp, Artificial
  Synthetic
agacttagggaccctgcggccgccattaattcctaatttttgttgacactctatcattgatagagttattttaccactccctatcagtgatagagaaaagtgaaatgaatagaccggccgctgagaaaaagcgaagcggcactgctctttaacaatttatcagacaatctgtgtgggcactcgaagatacggattcttaacgtcgcaagacgaaaaatgaataccaagtctcaagagtgaacacgtaattcattacgaagtttaattctttgagcgtcaaacttttcaacttgagagtttgatcctggctcagagcgaacgctggcggcaggcttaacacatgcaagtcgaacgggcgtagcaatacgtcagtggcagacgggtgagtaacgcgtgggaacgtaccttttggttcggaacaacacagggaaacttgtgctaataccggataagcccttacggggaaagatttatcgccgaaagatcggcccgcgtctgattagctagttggtgaggtaatggctcaccaaggcgacgatcagtagctggtctgagaggatgatcagccacattgggactgagacacggcccaaactcctacgggaggcagcagtggggaatattggacaatgggggaaaccctgatccagccatgccgcgtgagtgatgaaggccctagggttgtaaagctcttttgtgcgggaagataatgacggtaccgcaagaataagccccggctaacttcgtgccagcagccgcggtaatacgaagggggctagcgttgctcggaatcactgggcgtaaagggtgcgtaggcgggtttctaagtcagaggtgaaagcctggagctcaactccagaactgcctttgatactggaagtcttgagtatggcagaggtgagtggaactgcgagtgtagaggtgaaattcgtagatattcgcaagaacaccagtggcgaaggcggctcactgggccattactgacgctgaggcacgaaagcgtggggagcaaacaggattagataccctggtagtccacgccgtaaacgatgaatgccagccgttagtgggtttactcactagtggcgcagctaacgctttaagcattccgcctggggagtacggtcgcaagattaaaactcaaaggaattgacgggggcccgcacaagcggtggagcatgtggtttaattcgacgcaacgcgcagaaccttaccagcccttgacatgtccaggaccggtcgcagagacgcgaccttctcttcggagcctggagcacaggtgctgcatggctgtcgtcagctcgtgtcgtgagatgttgggttaagtcccgcaacgagcgcaacccccgtccttagttgctaccatttagttgagcactctaaggagactgccggtgataagccgcgaggaaggtggggatgacgtcaagtcctcatggcccttacgggctgggctacacacgtgctacaatggcggtgacaatgggaagctaaggggcgacccttcgcaaatctcaaaaagccgtctcagttcggattgggctctgcaactcgagcccatgaagttggaatcgctagtaatcgtggatcagcatgccacggtgaatacgttcccgggccttgtacacaccgcccgtcacaccatgggagttggctttacctgaagacggtgcgctaaccagcaatgggggcagccggccacggtagggtcagcgactggggtgaagtcgtaacaaggtagccgtaggggaacctgcggctggatcatgtggtttccttaaagaagcgtactttgtagtgctcacacagattgtctgatagaaagtgaaaagcaaggcgtttacgcgttgggagtgaggctgaagagaataaggccgttcgctttctattaatgaaagctcaccctacacgaaaatatcacgcaacgcgtgataagcaattttcgtgtccccttcgtctagaggcccaggacaccgccctttcacggcggtaacaggggttcgaatcccctaggggacgccacttgctggtttgtgagtgaaagtcgccgaccttaatatctcaaaactcatcttcgggtgatgtttgagatatttgctctttaaaaatctggatcaagctgaaaattgaaacactgaacaacgagagttgttcgtgagtctctcaaattttcgcaacacgatgatgaatcgaaagaaacatcttcgggttgtgaatcaagtgccttaagggtgttcgacggatgccttggcgctgagaggcgatgaaggacgtgctacgctgcgataagccatggggagctgcgaagaagctttgatccgtggatttccgaatggggaaacccaccttcgatagccggaactccaaggccttgcgtttcgagagagacgtgagggtttggatttccggttatcaagagaaggtatgagatctctgaatacataggaggtttcaagcgaacccagggaactgaaacatctaagtacctggaggaaaggacatcaaccgagactccgctagtagtggcgagcgaacgcggaccaggccagtcatcattggaagacaattggaatctgtcaggaaagcagagccttagagggtgatagccccgtacaagtaattcaaccattgatgctcgagtaaggcgggacacgtgaaatcctgtctgaacatggggggaccaccctccaagcctaagtactcctcagcgaccgatagtgaaccagtaccgtgagggaaaggtgaaaagcaccccgacgaggggagtgaaatagttcctgaaatcggacacctacaaacagacggagcccaagatacgttctgggtgacgtcgtaccttttgtattatgggccagcgacttaatttaacgagcaagcttaagccggtaggtgtaggcgcagcgaaagcgagtctgaatagggcgtcaagttcgttggattagacccgaaacctagtgatctagccatgagcaggttgaaggtgaggtaacactcactggaggaccgaacgggtgcctgttgaaaaaggctccgatgacttgtggttaggggtgaaaggccaatcaaactgggaaatagctggttctccgcgaaagatatttaggtatcgcctcggacgaatacctcagggggtagagcactggatgggctagggggacttaccgtcttaccaaacccaaccaaactccgaatacctgagagtactatccgggagtcacacggcgggtgctaacgtccgtcgtggagagggaaacaaccctgacctacagctaaggcccccaattcgtggctaagtgggaaaggatgtggaaatcccaaaacaaccaggaggttggcttagaagcagccatcctttaaagaaagcgtaacagctcactggtctaaataagggtttctgcgccgaagatgtaacggggctcaagccacgagccgaagcttagggtgtgcgcaagcacgcggtagcggagcgttctgtaagcctgcgaagggcgacccgtgagggcgcctggaggtatcagaagtgcgaatgctggcatgagtaacgacaaacactgtgaaagacagtgtcgccgaaagtccaagggttcctgcgtaaagttaatcttcgcagggttagccggtccctaaggcgaggccgaaaggcgtagtcgatgggaatcacgtgaatattcgtgagccagtggatggtgacgaatcccttatgttgttcgaccttactggattggtcgggcctcgacggggttccaggaaatagcctccacatcagaccgtacccgaaaccgacacaggtggactggtagagtataccaaggcgcttgagagaactatgttgaaggaactcggcaatttacctccgtaacttcgggataaggaggccttctgtttgcgcaagcaggcaggaggggcacagaccagggggtggcaactgtttaacaaaaacacagggctctgcgaaatcgcaagatgacgtatagggtctgacgcctgcccggtgccggaaggttaagaggaggagtgcaagctctgaattgaagccccggtaaacggcggccgtaactataacggtcctaaggtagcgaaattccttgtcgggtaagttccgacctgcacgaatggcgtaatgacttccccgctgtctccaacatagactcagtgaaattgaattccccgtgaagatgcggggttcctgcggtcagacggaaagaccccgtgcacctttactgtagctttgcgctggtattcgtgactgtttgtgtagaataggtggtaggctttgaagctcgggcgccagctcgggtggagccgcaatgtgaaataccaccctaatggttatggatatctaaccgcgatcccttatcgggttccgggacagcgcatggtgggcagtttgactggggcggtcgcctcccaaagagtaacggaggcgtgcgacggtaggctcagaacggtcggaaatcgttcgtcgagtacaatggcataagcctgcctgactgcgagaccaacaagtcgagcagagacgaaagtcggtcatagtgatccggtggtcccgcgtggatgggccatcgctcaacggataaaaggtacgccggggataacaggctgatgacgcccaagagtccatatcgacggcgtcgtttggcacctcgatgtcggctcatcacatcctggggctggagaaggtcccaagggttcggctgttcgccgattaaagtggtacgtgagctgggttcagaacgtcgtgagacagttcggtccctatctgccgtgggtgttggaatgttgagaggatttgcccctagtacgagaggaccggggtgaacgtacctctggtggagctgttgtcgcgccagcggcagtgcagcatagctatgtacggacgggataaccgctgaaagcatctaagcgggaaacccacctcaaaacgagcattcccttgagaaccgtggaagacgaccacgttgataggccggatgtggaagtgcagcaatgcatgtagcttaccggtactaatcgttcgattggcttgattgcacaacgccgaagctgttttggcggatgagagaagattttcagcctgatacagattaaatcagaacgcagaagcggtctgataaaacagaatttggcctggtggttctagcgaggagcctgaacccgttcccatcccgaacacggccgttaaactcctcagcgccaatggtactccgtctcaagacgcgggagagtaggtcgccgccaggcctcaaataaaacgaaaggctcagtcgaaagactgggcctttcgttttatctgttgtttgtcggtgaacgctctcctgagtaggacaaatccgccgggagcggatttgaacgttgcgaagcaacggcccggagggtggcgggcaggacgcccgccataaactgccaggcatcaaattaagcagaaggccatcctgacggatggcctttttgcgtttctacaaactcttcctgtcgtcatatctacaagccggcgcgccgggaaatgtgcgcggaacccctatttgtttatttttctaaatacattcaaatatgtatccgctcatgagacaataaccctgataaatgcttcaataatattgaaaaaggaagagtatgagtattcaacatttccgtgtcgcccttattcccttttttgcggcattttgccttcctgtttttgctcacccagaaacgctggtgaaagtaaaagatgctgaagatcagttgggtgcacgagtgggttacatcgaactggatctcaacagcggtaagatccttgagagttttcgccccgaagaacgttttccaatgatgagcacttttaaagttctgctatgtggcgcggtattatcccgtgttgacgccgggcaagagcaactcggtcgccgcatacactattctcagaatgacttggttgagtactcaccagtcacagaaaagcatcttacggatggcatgacagtaagagaattatgcagtgctgcaataaccatgagtgataacactgcggccaacttacttctgacaacgatcggaggaccgaaggagctaaccgcttttttgcacaacatgggggatcatgtaactcgccttgatcgttgggaaccggagctgaatgaagccataccaaacgacgagcgtgacaccacgatgcctgcagcaatggcaacaacgttgcgcaaactattaactggcgaactacttactctagcttcccggcaacaattaatagactggatggaggcggataaagttgcaggaccacttctgcgctcggcccttccggctagctggtttattgctgataaatctggagccggtgagcgtgggtctcgcggtatcattgcagcactggggccagatggtaagccctcccgtatcgtagttatctacacgacggggagtcaggcaactatggatgaacgaaatagacagatcgctgagataggtgcctcactgattaagcattggtaactgcagaccaagtttactcatatatactttagattgatttaaaacttcatttttaatttaaaaggatctaggtgaagatcctttttgataatctcatgaccaaaatcccttaacgtgagttttcgttccactgagcgtcagaccccgtagaaaagatcaaaggatcttcttgagatcctttttttctgcgcgtaatctgctgcttgcaaacaaaaaaaccaccgctaccagcggtggtttgtttgccggatcaagagctaccaactctttttccgaaggtaactggcttcagcagagcgcagataccaaatactgtccttctagtgtagccgtagttaggccaccacttcaagaactctgtagcaccgcctacatacctcgctctgctaatcctgttaccagtggctgctgccagtggcgataagtcgtgtcttaccgggttggactcaagacgatagttaccggataaggcgcagcggtcgggctgaacggggggttcgtgcacacagcccagcttggagcgaacgacctacaccgaactgagatacctacagcgtgagctatgagaaagcgccacgcttcccgaagggagaaaggcggacaggtatccggtaagcggcagggtcggaacaggagagcgcacgagggagcttccagggggaaacgcctggtatctttatagtcctgtcgggtttcgccacctctgacttgagcgtcgatttttgtgatgctcgtcaggggggcggagcctatggaaaaacgccagcaacgcggcctttttacggttcctggccttttgctgg

SEQ ID NO: 10 - DNA, 7451 bp, Artificial
  Synthetic
agacttagggaccctgcggccgccattaattcctaatttttgttgacactctatcattgatagagttattttaccactccctatcagtgatagagaaaagtgaaatgaatagaccggccgctgagaaaaagcgaagcggcactgctctttaacaatttatcagacaatctgtgtgggcactcgaagatacggattcttaacgtcgcaagacgaaaaatgaataccaagtctcaagagtgaacacgtaattcattacgaagtttaattctttgagcgtcaaactttttaactggagagtttgattctggctcagattgaacgctggcggcgtgcttaacacatgcaagtcgcgcgtgaaagggcttcggcccgagtaaagcggcgcacgggtgagtaacgcgtggatgatctacccatgagttgggaataacggctggaaacggtcgctaataccgaatacgctccgatttcaacttcgggggaaaggtggcctctgcttgcaagctactgctcatggatgagtccgcgtcccattagctagttggtggggtaacggcccaccaaggcgacgatgggtagccggtctgagaggatgaccggccacactgggactggaacacggcccagactcctacgggaggcagcagtggggaatattgcgcaatgggcgaaagcctgacgcagcgacgccgcgtgagggatgaaggtcctcggatcgtaaacctctgtcaggagggaagaaccgccacggtgctaatcagccgtggtctgacggtacctccaaaggaagcaccggctaactccgtgccagcagccgcggtaatacggagggtgcgagcgttaatcggaatcactgggcgtaaagcgcacgtaggctgcttggtaagtcaggggtgaaagcccgcggctcaaccgcggaattgcctttgatactgccgagctagagtccgggagagggtagtggaattccaggtgtaggagtgaaatccgtagagatctggaggaacatcagtggcgaaggcgactacctggaccggtactgacgctgaggtgcgaaagcgtggggagcaaacaggattagataccctggtagtccacgccgtaaacgatggatgctaggtgtcggggccttgagcttcggtgccgtagttaacgcgttaagcatcccgcctggggagtacggtcgcaaggctgaaactcaaagaaattgacgggggcccgcacaagcggtggagtatgtggtttaattcgatgcaacgcgaagaaccttacctaggtttgacatccggaagaccttcccgaaaaggaagggtgcccttcggggaattccgagacaggtgctgcatggctgtcgtcagctcgtgccgtgaggtgttgggttaagtcccgcaacgagcgcaacccctattgccagttgctaccaggtaatgctgggcactctggtgagactgccccggttaacggggaggaaggtggggacgacgtcaagtcatcatggcccttacgcctagggctacacacgtactacaatggcgcatacaaagggcagcgataccgcgaggtggagccaatcccaaaaagtgcgtcccagtccggattgcagtctgcaactcgactgcatgaagttggaatcgctagtaattcgagatcagcatgctcgggtgaatgcgttcccgggccttgtacacaccgcccgtcacaccacgaaagttggttttacccgacaccggtgagctaaccagcaatggaggcagccgtctacggtagggccgatgattggggtgaagtcgtaacaaggtagccgtaggggaacctgcggctggatcatgtggtttccttaaagaagcgtactttgtagtgctcacacagattgtctgatagaaagtgaaaagcaaggcgtttacgcgttgggagtgaggctgaagagaataaggccgttcgctttctattaatgaaagctcaccctacacgaaaatatcacgcaacgcgtgataagcaattttcgtgtccccttcgtctagaggcccaggacaccgccctttcacggcggtaacaggggttcgaatcccctaggggacgccacttgctggtttgtgagtgaaagtcgccgaccttaatatctcaaaactcatcttcgggtgatgtttgagatatttgctctttaaaaatctggatcaagctgaaaattgaaacactgaacaacgagagttgttcgtgagtctctcaaattttcgcaacacgatgatgaatcgaaagaaacatcttcgggttgtgagaacaagttaccaagggcaacaggtggatgccttggcgctggaaggcgaagaaagacgtggtaggctgcgataagtctcggggaggagccaaacatcctttgatccgggaatgtctgaatggggaaacccggcaggagtcatgtcctgtcacccgcaactgaacaaataggttgcagggagccaacccggggaagtgaaacatctcagtacccggaggaaaggaaatcaaacgagactcccgaagtagcggcgagcgaaccgggattagcccaaaccggatggtttcgaccatccggggttgtaggacctcgatgtgggattgactactaggcaggagaagtgagctggaaagctccgccatagcgagtgatagcctcgtatctgaaaccgaacgtcaccctagaggcacctgagtactgcgaggcacgtgaaacctcgtgggaatctgggaggaccatcttccaaggctaagtactaaccagcgaccgatagtgcactagtaccgtgagggaaaggtgaaaagaacccctgtcaggggagtgaaatagaatctgaaacctgttgcctacaagctgtgggagcatccttgagatgtgaccgcgtgccttttgcataatgagtcagcgagttactctgtcgtgcgaggttaagcgaaagtggagccgtagcgaaagcgagtctgataagggcgataagtacgacggagtagacccgaaaccgggtgatctatccatgagcaggttgaagcaagggtaaagccttgtggaggaccgaaccagtaacggctgaaaacgttttggatgacttgtggataggggtgaaaggccaatcaaactcggtgatagctggttctccccgaaatatattgaggtatagcctcgggaaattgtctcgcggaggtagagcactgacagggctaggggtcccaccagattaccaaaccctttcaaactccgaatgccgcagagatgtaccccgggagtcagacggcgggtgcgaaggtccgtcgtcaaaagggaaacagcccagatcgacagctaaggcctccaattccatgctcagtgggaaaggtggtggagttgttcagacagccaggacgttggcttagaagcagccatcgtttaaagaaagcgtaatagctcactggtctaatgactctgcgccgaaaatgtaacggggctaagcatggagccgaagcttcgggatcgtctagtacgatcggtaggggagcgttctctgtgggctgaaggtttgccggaaggcacgctggactgcagagaagtgattatgctgacatgagtaacgataaaacaggtgagaaacctgttcgccgtaaacccaaggtttcctgggtaaaggtaatcttcccagggttagtcggtccctaaggcgagggcgaaagccgtagtcgatgggaaacgggttaatattcccgtacctgtgcgttcgcgcgatggagggacggagaaggataagcgagccggctgttggcttagccggtgcaagtgcgtaggcttgggggagaggcaaatccgccccctttaaggccgagacacgagtccgtgaccgcaaggtctgaagtcgccgagtccatgctccctagaaaagctcctaagtatagtgcgtacagaccgtaccggaaaccaacacaggtgggtggggtgaataacccaaggcgctcgagagaactctggccaaggaactcggcaaaatgaccccgtaacttcggaagaaggggtgctctctaaggtgtagggtatacatccaaagcctcggagagccgcagtgaaatggtggtggcgactgtttactaaaaacataggtctctgcgaagtcgcaagacgacgtatagggactgacgcctgcccggtgccggaaggttaagaggaggggtcagcgcaagcgaagctccgaatcgaagccccggtaaacggcggccgtaactataacggtcctaaggtagcgaaattccttgtcgggtaagttccgacctgcacgaatggcgtaacgatctccacactgtctcggccagagactcggtgaaattgaagtcgcggtgaaaatgccgtgtacccgcagaaagacggaaagaccctgtgcacctttactatagcttgacattgggttttgggcttgcatgtgtaggataggtgggaggctgtgaaccctgtacgccagtatggggggagccatccttgaaataccacccttgcaagtctaaggctctaatccctacccgtgatccgggagggagacagtgtctggtgggtagtttgactggggcggtcgcctcccaaattgtaacggaggcacgcaaaggttccctcagcctgattggaaaccaggcgtcgagtgcaaacgcataagggagcttgactgcaagacagacatgtcgagcagggacgaaagtcggcgttagtgatccggtggttccgcatggaagggccatcgctcattggataaaaggtacgccggggataacaggctgatcgcgcccaagagttcatatcgacggcgcggtttggcacctcgatgtcggctcatcacatcctggggctgaagcaggtcccaagggtacggctgttcgccgtttaaagtggtacgcgagctgggtttaaaacgtcgtgagacagtttggtccctatcttctgtgggcgtaggagaattgagagggcctgtccctagtacgagaggaccgggatggacatacctctggtggtcctgttgtcgcgccagcggcatagcagggtagctatgtgtggaagggataaccgctgaaagcatctaagcgggaagcctgcctcaagataagttctcccctcttttagagctgaagggcccaggtagactacctggtcgataggctggaggtggaagtgcggcgacgcatggagctgaccagtactaatagcccgagcgccttgttttcacaacgccgaagctgttttggcggatgagagaagattttcagcctgatacagattaaatcagaacgcagaagcggtctgataaaacagaatttgtcctggcgtccatggaggagggggtacacccgatcccattccgaactcggaagttaagccctccatcgccgatgatactgcggggtagctcgtgggaaagtaggccgacgccaggactcaaataaaacgaaaggctcagtcgaaagactgggcctttcgttttatctgttgtttgtcggtgaacgctctcctgagtaggacaaatccgccgggagcggatttgaacgttgcgaagcaacggcccggagggtggcgggcaggacgcccgccataaactgccaggcatcaaattaagcagaaggccatcctgacggatggcctttttgcgtttctacaaactcttcctgtcgtcatatctacaagccggcgcgccgggaaatgtgcgcggaacccctatttgtttatttttctaaatacattcaaatatgtatccgctcatgagacaataaccctgataaatgcttcaataatattgaaaaaggaagagtatgagtattcaacatttccgtgtcgcccttattcccttttttgcggcattttgccttcctgtttttgctcacccagaaacgctggtgaaagtaaaagatgctgaagatcagttgggtgcacgagtgggttacatcgaactggatctcaacagcggtaagatccttgagagttttcgccccgaagaacgttttccaatgatgagcacttttaaagttctgctatgtggcgcggtattatcccgtgttgacgccgggcaagagcaactcggtcgccgcatacactattctcagaatgacttggttgagtactcaccagtcacagaaaagcatcttacggatggcatgacagtaagagaattatgcagtgctgcaataaccatgagtgataacactgcggccaacttacttctgacaacgatcggaggaccgaaggagctaaccgcttttttgcacaacatgggggatcatgtaactcgccttgatcgttgggaaccggagctgaatgaagccataccaaacgacgagcgtgacaccacgatgcctgcagcaatggcaacaacgttgcgcaaactattaactggcgaactacttactctagcttcccggcaacaattaatagactggatggaggcggataaagttgcaggaccacttctgcgctcggcccttccggctagctggtttattgctgataaatctggagccggtgagcgtgggtctcgcggtatcattgcagcactggggccagatggtaagccctcccgtatcgtagttatctacacgacggggagtcaggcaactatggatgaacgaaatagacagatcgctgagataggtgcctcactgattaagcattggtaactgcagaccaagtttactcatatatactttagattgatttaaaacttcatttttaatttaaaaggatctaggtgaagatcctttttgataatctcatgaccaaaatcccttaacgtgagttttcgttccactgagcgtcagaccccgtagaaaagatcaaaggatcttcttgagatcctttttttctgcgcgtaatctgctgcttgcaaacaaaaaaaccaccgctaccagcggtggtttgtttgccggatcaagagctaccaactctttttccgaaggtaactggcttcagcagagcgcagataccaaatactgtccttctagtgtagccgtagttaggccaccacttcaagaactctgtagcaccgcctacatacctcgctctgctaatcctgttaccagtggctgctgccagtggcgataagtcgtgtcttaccgggttggactcaagacgatagttaccggataaggcgcagcggtcgggctgaacggggggttcgtgcacacagcccagcttggagcgaacgacctacaccgaactgagatacctacagcgtgagctatgagaaagcgccacgcttcccgaagggagaaaggcggacaggtatccggtaagcggcagggtcggaacaggagagcgcacgagggagcttccagggggaaacgcctggtatctttatagtcctgtcgggtttcgccacctctgacttgagcgtcgatttttgtgatgctcgtcaggggggcggagcctatggaaaaacgccagcaacgcggcctttttacggttcctggccttttgctgg

SEQ ID NO: 11 - DNA, 7231 bp, Artificial
  Synthetic
agacttagggaccctgcggccgccattaattcctaatttttgttgacactctatcattgatagagttattttaccactccctatcagtgatagagaaaagtgaaatgaatagaccggccgctgagaaaaagcgaagcggcactgctctttaacaatttatcagacaatctgtgtgggcactcgaagatacggattcttaacgtcgcaagacgaaaaatgaataccaagtctcaagagtgaacacgtaattcattacgaagtttaattctttgagcgtcaaacttttaaacttgagagtttgatcctggctcagaacgaacgctatcggtatgcttaacacatgcaagtcgaacggactaatttggggcttgctccaattagttagtggcagacgggtgagtaacacgtgggaatctacccattagtacggaataacttttagaaataaaagctaataccgtatattctctgcggaggaaagatttatcgctgatggatgagcccgcgtcagattaggtagttggtgaggtaatagctcaccaagccgacgatctgtagctggtctgagaggatgatcagccacactgggactgagacacggcccagactcctacgggaggcagcagtggggaatattggacaatgggcgaaagcctgatccagcaataccgagtgagtgatgaaggccttagggttgtaaagctcttttagcaaggaagataatgacgttacttgcagaaaaagccccggctaactccgtgccagcagccgcggtaagacggagggggctagcgttgttcggaattactgggcgtaaagagtgcgtaggcggtttagtaagttggaagtgaaagcccggggcttaacctcggaattgctttcaaaactactaatctagagtgtagtaggggatgatggaattcctagtgtagaggtgaaattcttagatattaggaggaacaccggtggcgaaggcggtcgtctgggctacaactgacgctgatgcacgaaagcgtggggagcaaacaggattagataccctggtagtccacgccgtaaacgatgagtgctagatatcggaagattctctttcggtttcgcagctaacgcattaagcactccgcctggggagtacggtcgcaagattaaaactcaaaggaattgacgggggctcgcacaagcggtggagcatgcggtttaattcgatgttacgcgaaaaaccttaccaacccttgacatggtggtcgcggatcgcagagatgcttttcttcagctcggctggaccacacacaggtgttgcatggctgtcgtcagctcgtgtcgtgagatgttgggttaagtcccgcaacgagcgcaaccctcattcttatttgccagcgggtaatgccgggaactataagaaaactgccggtgataagccggaggaaggtggggacgacgtcaagtcatcatggcccttacgggttgggctacacgcgtgctacaatggtgtttacagagggaagcaagacggcgacgtggagcaaatccctaaaagacatctcagttcggattgttctctgcaactcgagagcatgaagttggaatcgctagtaatcgcggatcagcatgccgcggtgaatacgttctcgggccttgtacacactgcccgtcacgccatgggagttagttttacctgaaggtggtgagctaacgcaagaggcagccaaccacggtaaaattagcgactggggtgaagtcgtaacaaggtagccgtaggggaacctgcggctggattatgtggttaccttaaagaagcgtactttgtagtgctcacacagattgtctgatagaaagtgaaaagcaaggcgtttacgcgttgggagtgaggctgaagagaataaggccgttcgctttctattaatgaaagctcaccctacacgaaaatatcacgcaacgcgtgataagcaattttcgtgtccccttcgtctagaggcccaggacaccgccctttcacggcggtaacaggggttcgaatcccctaggggacgccacttgctggtttgtgagtgaaagtcgccgaccttaatatctcaaaactcatcttcgggtgatgtttgagatatttgctctttaaaaatctggatcaagctgaaaattgaaacactgaacaacgagagttgttcgtgagtctctcaaattttcgcaacacgatgatgaatcgaaagaaacatcttcgggttgtgaagtaaatataataagagcatttggtggatgccttggcactagaaggcgatgaaggacgtaatacgctgcgataagcttcggggagttgcgaataaactttgatccgaagatttccgaataggggaacctacctaatttattaggtattgtatagtgaatacatagctatatgaggcaaacccagcgaactgaaatatctaagtagctggaggaaaggacatcaaccgagactccgttagtagtgacgagcgaacgcggatcaggccagtggcttcaaaaaaataactaaaacaacatggaaaggttgaccatagagggtgatagtcccgtataggtaaaaagtttgaagtccttgagtaaggcgggacacgtgaaatcctgtttgaacatagggggaccaccctctaagcctaagtactctctagtgaccgatagtgaacaagtaccgtgagggaaaggtgaaaagtaccccgacaaggggagtgaaatagtatctgaaaccaaatgcttacaagcagtcggagcaagcgtatttatatgtcttgtgacggcgtaccttttgtataatgggtcagcgacttagtttatctagcaagcttaagccgttaggtgtaggcgtagcgaaagcgagtctgaatagggcgtttagttagatgaattagacccgaaaccgggtgatctagccatggccaggttgaaagcggagtaaaatccactgaaggaccgaacccactactgttgaaaaagtaggggatgagctgtggttaggggtgaaaggccaatcaaactcggatatagctggttctccgcgaaatctatttaggtagagcgttatagcgattaccatcgaaggtagagcactgaatgagctagggggtcccacagacttaccaaactcaatcaaactccgaatgtcgatgagtacagcatagcagacagactatgggtgctaaggtccatagtcgagagggaaaaagcccagaccgccatctaaggtccctaaatcatgactaagtgttaaaggatgtgagaagaccaaaacaactaggatgttggcttagaagcagccatcatttaaagaaagcgtaatagctcactagtctaaataagttttcttgcgccaacaatgtaacggggctcaagtcatgtaccgaagatgcgggtttatgcatttggcataaatggtagcggagcgttccgtaagcctgcgaaggtgaaccgtgaggtttgctggaggtatcggaagtgagaatgctgacataagtagcgataaagaatgtgagaaacattctcgccgaaagtccaagggttcttgcgtaaagttaatctgcgcaaggttagtcggcccctaagatgaggctgaaaggcgtaatcgatgggaatcaggttaatattcctgaacctgaaggatgtgacgaaaatagtaaattgtacagtcttattggattgattgtgcggtgaatattttccaggaaataacacctttattatagaccgtacccgaaaccgacacaggtggacaggtagagtataccaaggcgcttgagagaacgatgctgaaggaactaggcaaattgcatctgtaacttcggaagaaagatgacctgtatatgggcaaccatgtgcaggtggcacaagctagggggtagcgactgtttattaaaaacacagggctctgcaaagtcaatagacgatgtatagggtctgacgcctgcccagtgctggaagattaaaaggaggggtgcaagctctgaattgaagtcccagtgaacggcggccgtaactatgacggtcctaaggtagcgaaattccttgtcgggtaagttccgacccgcacgaatggcgtaacgatttccccactgtctccagtatcgactcagcgaaattgaattctccgtgaagatgcggagttcccgcggtcagacggaaagaccccgtgaacctttactatagctttgcactggtgttaggaatcagatgtgcaggataggtgggagactacgaagcgaaggcgtcagcctttgtggagtcacccttgagataccacccttttggtgcttgacatctaaccgagatccttgaatcaggatccgagacaatgcatggtgggtagtttgactggggcggtcgcctcccaaagagtaacggaggcgcgcgatggttagctcaggttggtcggaaatcaacttttagagtgcaatggcataagctagcctgactgcgagtctgacaagacgagcagagacgaaagtcggtcatagtgatccggtggtcccgagtggaagggccatcgctcaacgaataaaaggtactccggggataacaggctgatgatttccaagcgtccatagcgacgaaatcgtttggcacctcgatgtcggctcatcacatcctggggctggagaaggtcccaagggttcggctgttcgccgattaaagtggtacgtgagctgggtttagaacgtcgtgagacagttcggtccctatctgccgtgggtgtaggaagtttgagaggatctgcctttagtacgagaggaccgaggtggacgtacccctggtggaccagttgtcgtgccaacggcacagctgggtagctaagtacggaagggataactgctgaatgcatctaagcaggaaacccacctcaaaactagacttccccattagagccgtggaagaccaccacgttgataggtcggatgtggaagcacagtaatgtgtgtagctaaccgatactaatagctcgattgatttactttgacaacgccgaagctgttttggcggatgagagaagattttcagcctgatacagattaaatcagaacgcagaagcggtctgataaaacagaattagcttggtggttatagcatgagtgaaacacacgatcccatcccgaactcgaatgtgaaacctcatagcgctaatggtactatgtcataaggcatgggagagtaagtcgctgccaagcttcaaataaaacgaaaggctcagtcgaaagactgggcctttcgttttatctgttgtttgtcggtgaacgctctcctgagtaggacaaatccgccgggagcggatttgaacgttgcgaagcaacggcccggagggtggcgggcaggacgcccgccataaactgccaggcatcaaattaagcagaaggccatcctgacggatggcctttttgcgtttctacaaactcttcctgtcgtcatatctacaagccggcgcgccgggaaatgtgcgcggaacccctatttgtttatttttctaaatacattcaaatatgtatccgctcatgagacaataaccctgataaatgcttcaataatattgaaaaaggaagagtatgagtattcaacatttccgtgtcgcccttattcccttttttgcggcattttgccttcctgtttttgctcacccagaaacgctggtgaaagtaaaagatgctgaagatcagttgggtgcacgagtgggttacatcgaactggatctcaacagcggtaagatccttgagagttttcgccccgaagaacgttttccaatgatgagcacttttaaagttctgctatgtggcgcggtattatcccgtgttgacgccgggcaagagcaactcggtcgccgcatacactattctcagaatgacttggttgagtactcaccagtcacagaaaagcatcttacggatggcatgacagtaagagaattatgcagtgctgcaataaccatgagtgataacactgcggccaacttacttctgacaacgatcggaggaccgaaggagctaaccgcttttttgcacaacatgggggatcatgtaactcgccttgatcgttgggaaccggagctgaatgaagccataccaaacgacgagcgtgacaccacgatgcctgcagcaatggcaacaacgttgcgcaaactattaactggcgaactacttactctagcttcccggcaacaattaatagactggatggaggcggataaagttgcaggaccacttctgcgctcggcccttccggctagctggtttattgctgataaatctggagccggtgagcgtgggtctcgcggtatcattgcagcactggggccagatggtaagccctcccgtatcgtagttatctacacgacggggagtcaggcaactatggatgaacgaaatagacagatcgctgagataggtgcctcactgattaagcattggtaactgcagaccaagtttactcatatatactttagattgatttaaaacttcatttttaatttaaaaggatctaggtgaagatcctttttgataatctcatgaccaaaatcccttaacgtgagttttcgttccactgagcgtcagaccccgtagaaaagatcaaaggatcttcttgagatcctttttttctgcgcgtaatctgctgcttgcaaacaaaaaaaccaccgctaccagcggtggtttgtttgccggatcaagagctaccaactctttttccgaaggtaactggcttcagcagagcgcagataccaaatactgtccttctagtgtagccgtagttaggccaccacttcaagaactctgtagcaccgcctacatacctcgctctgctaatcctgttaccagtggctgctgccagtggcgataagtcgtgtcttaccgggttggactcaagacgatagttaccggataaggcgcagcggtcgggctgaacggggggttcgtgcacacagcccagcttggagcgaacgacctacaccgaactgagatacctacagcgtgagctatgagaaagcgccacgcttcccgaagggagaaaggcggacaggtatccggtaagcggcagggtcggaacaggagagcgcacgagggagcttccagggggaaacgcctggtatctttatagtcctgtcgggtttcgccacctctgacttgagcgtcgatttttgtgatgctcgtcaggggggcggagcctatggaaaaacgccagcaacgcggcctttttacggttcctggccttttgctgg

SEQ ID NO: 12 - DNA, 7368 bp, Artificial
  Synthetic
agacttagggaccctgcggccgccattaattcctaatttttgttgacactctatcattgatagagttattttaccactccctatcagtgatagagaaaagtgaaatgaatagaccggccgctgagaaaaagcgaagcggcactgctctttaacaatttatcagacaatctgtgtgggcactcgaagatacggattcttaacgtcgcaagacgaaaaatgaataccaagtctcaagagtgaacacgtaattcattacgaagtttaattctttgagcgtcaaactttttttatggagagtttgatcctggctcagagtgaacgctggcggcgtgcctaatacatgcaagtcgaacgatgaagctttctagcttgctagaaggctgattagtggcgcacgggtgagtaacgcataggttatgtgccttttagtttgggatagccattggaaacgatgattaataccagatactccctacgggggaaagatttatcgctaagagatcagcctatgtcctatcagcttgttggtaaggtaatggcttaccaaggctatgacgggtatccggcctgagagggtgaacggacacactggaactgagacacggtccagactcctacgggaggcagcagtagggaatattgctcaatgggggaaaccctgaagcagcaacgccgcgtggaggatgaaggttttaggattgtaaactccttttgttagagaagataatgacggtatctaacgaataagcaccggctaactccgtgccagcagccgcggtaatacggagggtgcaagcgttactcggaatcactgggcgtaaagagcgcgtaggcgggatagtcagtcaggtgtgaaatcctatggcttaaccatagaactgcatttgaaactactattctagagtgtgggagaggtaggtggaattcttggtgtaggggtaaaatccgtagagatcaagaggaatactcattgcgaaggcgacctgctggaacattactgacgctgattgcgcgaaagcgtggggagcaaacaggattagataccctggtagtccacgccctaaacgatggatgctagttgttggagggcttagtctctccagtaatgcagctaacgcattaagcatcccgcctggggagtacggtcgcaagattaaaactcaaaggaatagacggggacccgcacaagcggtggagcatgtggtttaattcgaagatacacgaagaaccttacctaggcttgacattgagagaatccgctagaaatagtggagtgtctggcttgccagaccttgaaaacaggtgctgcacggctgtcgtcagctcgtgtcgtgagatgttgggttaagtcccgcaacgagcgcaaccccctttcttagttgctaacaggtcatgctgagaactctaaggatactgcctccgtaaggaggaggaaggtggggacgacgtcaagtcatcatggcccttacgcctagggctacacacgtgctacaatggggtgcacaaagagaagcaatactgcgaagtggagccaatcttcaaaacatctctcagttcggattgtaggctgcaactcgcctgcatgaagctggaatcgctagtaatcgcaaatcagccatgttgcggtgaatacgttcccgggtcttgtactcaccgcccgtcacaccatgggagttgtgtttgccttaagtcaggatgctaaattggctactgcccacggcacacacagcgactggggtgaagtcgtaacaaggtaaccgtaggtgaacctgcggttggatcatgtggtttccttaaagaagcgtactttgtagtgctcacacagattgtctgatagaaagtgaaaagcaaggcgtttacgcgttgggagtgaggctgaagagaataaggccgttcgctttctattaatgaaagctcaccctacacgaaaatatcacgcaacgcgtgataagcaattttcgtgtccccttcgtctagaggcccaggacaccgccctttcacggcggtaacaggggttcgaatcccctaggggacgccacttgctggtttgtgagtgaaagtcgccgaccttaatatctcaaaactcatcttcgggtgatgtttgagatatttgctctttaaaaatctggatcaagctgaaaattgaaacactgaacaacgagagttgttcgtgagtctctcaaattttcgcaacacgatgatgaatcgaaagaaacatcttcgggttgtgaaaacaagcttttaagagcagatggcggatgccttgccaaagagaggcgatgaaggacgtactagactgcgataagctatgcggagctgtcaaggagctttgatgcgtagatgtccgaatggggcaacccaactaatagagatattagttactctaatttagagagcgaacctagtgaagtgaaacatctcagtaactagaggaaaagaaatcaacgagattccctaagtagtggcgagcgaacggggaaaagggcaaaccgagtgcttgcattcggggttgaggactgcaacatccaagagaacgctttagcagagttacctggaaaggtaagccatagaaagtgatagccttgtatgcgacaaggcgttcttaggtagcaggatccagagtaggccaggacacgagaaatccaggttgaagccggggagaccactctccaaccctaaatactactctttgagcgatagcgaacaagtaccgtgagggaaaggtgaaaagaaccgcagtgagcggagtgaaatagaacctgaaaccatctgtttacaatcattcagagccctatgatttatcagggtgatggactgccttttgcataatgatcctgcgagttgtggtatctggcaaggttaagcggatgcgaagccgtagcgaaagcgagtcttaatagggcgatttaagtcagatgctgcagacccgaagctaagtgatctatccatggccaagttgaaacgcgtgtaatagcgcgtggaggactgaactcgtacccattgaaacgggttgggatgagctgtggataggggtgaaaggccaaacaaacttagtgatagctggttctcttcgaaatatatttaggtatagcctcaagtgataataaaagggggtagagccctgattgggctagggctgctcgccgcggtaccaaaccctatcaaacttcgaataccttttatcgtatcttgggagtcaggcggtgggtgataaaatcaatcgtcaaaaggggaacaacccagactaccaaataaggtccctaagttctattctgagtggaaaaagatgtgtggctactcaaacaaccaggaggttggcttagaagcagccatcctttaaagaaagcgtaacagctcactggtctagtggtcatgcgctgaaaatataacggggctaagatagacaccgaatttgtagattgtgttaaacacagtggtagaagagcgttcataccagcgttgaaggtataccggtaaggagtgctggagcggtatgaagtgagcatgcaggaatgagtaacgataagatatatgagaattgtatccgccgtaaatctaaggtttcctacgcgatggtcgtcatcgtagggttagtcgggtcctaagccgagtccgaaaggggtaggtgatggcaaattggttaatattccaataccgacttatggagcgtgatggggggacgcatagggttaagcgagctagctgatggaagcgctagtctaagggcgtagattggagggaaggcaaatccacctctgtatttgaaacccaaacaggctctttgagtccttttaggacaaagggagaatcgctgataccgtcgtgccaagaaaagcctctaagcatatccatagtcgtccgtaccgcaaaccgacacaggtagatgagatgagtattctaaggcgcgtgaaagaactctggttaaggaactctgcaaactagcaccgtaagttcgcgataaggtgtgccgcagcaatgcggtctcagcaaagagtccctcccgactgtttaccaaaaacacagcactttgccaactcgtaagaggaagtataaggtgtgacgcctgcccggtgctcgaaggttaagaggatgcgtcagtcgcaagatgaagcgttgaattgaagcccgagtaaacggcggccgtaactataacggtcctaaggtagcgaaattccttgtcggttaaataccgacctgcatgaatggcgtaacgagatgggagctgtctcaaccagagattcagtgaaattgtagtggaggtgaaaattcctcctacccgcggcaagacggaaagaccccgtggacctttactacaacttagcactgctaacgggaatatcatgcgcaggataggtgggaggctttgaagtaagggctttggctcttatggagccatccttgagataccacccttgatgtttctgttagctaactggcctgtgttatccacaggcaggacaatgcttggtgggtagtttgactggggcggtcgcctcctaaaaagtaacggaggcttgcaaaggttggctcattgcggttggaaatcgcaagttgagtgtaatggcacaagccagcctgactgtaagacatacaagtcaagcagagacgaaagtcggtcatagtgatccggtggttctgtgtggaagggccatcgctcaaaggataaaaggtaccccggggataacaggctgatctcccccaagagctcacatcgacggggaggtttggcacctcgatgtcggctcatcgcatcctggggctggagcaggtcccaagggtatggctgttcgccatttaaagcggtacgcgagctgggttcagaacgtcgtgagacagttcggtccctatctgccgtgggcgtaggaaagttgaggagagctgtccctagtacgagaggaccgggatggacgtgtcactggtgcaccagttgttctgccaagagcatcgctgggtagctacacacggatgtgataactgctgaaagcatctaagcaggaagccaactccaagatgaactttccctgaagctcgcacaaagactatgtgcttgatagggtagatgtgtaagcgcagtaatgcgtttagctgactactactaatagagcgtttggcttgtttttacaacgccgaagctgttttggcggatgagagaagattttcagcctgatacagattaaatcagaacgcagaagcggtctgataaaacagaattttccttgtgcctttagagaagaggaactacccagttaaccattccgaacctggaagtcaagctcttcatcgctgataatactgctcttttcaagagtgggaatgtaggtcggtgcagggatacaaataaaacgaaaggctcagtcgaaagactgggcctttcgttttatctgttgtttgtcggtgaacgctctcctgagtaggacaaatccgccgggagcggatttgaacgttgcgaagcaacggcccggagggtggcgggcaggacgcccgccataaactgccaggcatcaaattaagcagaaggccatcctgacggatggcctttttgcgtttctacaaactcttcctgtcgtcatatctacaagccggcgcgccgggaaatgtgcgcggaacccctatttgtttatttttctaaatacattcaaatatgtatccgctcatgagacaataaccctgataaatgcttcaataatattgaaaaaggaagagtatgagtattcaacatttccgtgtcgcccttattcccttttttgcggcattttgccttcctgtttttgctcacccagaaacgctggtgaaagtaaaagatgctgaagatcagttgggtgcacgagtgggttacatcgaactggatctcaacagcggtaagatccttgagagttttcgccccgaagaacgttttccaatgatgagcacttttaaagttctgctatgtggcgcggtattatcccgtgttgacgccgggcaagagcaactcggtcgccgcatacactattctcagaatgacttggttgagtactcaccagtcacagaaaagcatcttacggatggcatgacagtaagagaattatgcagtgctgcaataaccatgagtgataacactgcggccaacttacttctgacaacgatcggaggaccgaaggagctaaccgcttttttgcacaacatgggggatcatgtaactcgccttgatcgttgggaaccggagctgaatgaagccataccaaacgacgagcgtgacaccacgatgcctgcagcaatggcaacaacgttgcgcaaactattaactggcgaactacttactctagcttcccggcaacaattaatagactggatggaggcggataaagttgcaggaccacttctgcgctcggcccttccggctagctggtttattgctgataaatctggagccggtgagcgtgggtctcgcggtatcattgcagcactggggccagatggtaagccctcccgtatcgtagttatctacacgacggggagtcaggcaactatggatgaacgaaatagacagatcgctgagataggtgcctcactgattaagcattggtaactgcagaccaagtttactcatatatactttagattgatttaaaacttcatttttaatttaaaaggatctaggtgaagatcctttttgataatctcatgaccaaaatcccttaacgtgagttttcgttccactgagcgtcagaccccgtagaaaagatcaaaggatcttcttgagatcctttttttctgcgcgtaatctgctgcttgcaaacaaaaaaaccaccgctaccagcggtggtttgtttgccggatcaagagctaccaactctttttccgaaggtaactggcttcagcagagcgcagataccaaatactgtccttctagtgtagccgtagttaggccaccacttcaagaactctgtagcaccgcctacatacctcgctctgctaatcctgttaccagtggctgctgccagtggcgataagtcgtgtcttaccgggttggactcaagacgatagttaccggataaggcgcagcggtcgggctgaacggggggttcgtgcacacagcccagcttggagcgaacgacctacaccgaactgagatacctacagcgtgagctatgagaaagcgccacgcttcccgaagggagaaaggcggacaggtatccggtaagcggcagggtcggaacaggagagcgcacgagggagcttccagggggaaacgcctggtatctttatagtcctgtcgggtttcgccacctctgacttgagcgtcgatttttgtgatgctcgtcaggggggcggagcctatggaaaaacgccagcaacgcggcctttttacggttcctggccttttgctgg

SEQ ID NO: 13 - DNA, 7244 bp, Artificial
  Synthetic
agacttagggaccctgcggccgccattaattcctaatttttgttgacactctatcattgatagagttattttaccactccctatcagtgatagagaaaagtgaaatgaatagaccggccgctgagaaaaagcgaagcggcactgctctttaacaatttatcagacaatctgtgtgggcactcgaagatacggattcttaacgtcgcaagacgaaaaatgaataccaagtctcaagagtgaacacgtaattcattacgaagtttaattctttgagcgtcaaacttttcaacctgagagtttgatcctggctcagagcgaacgctggcggcaggcctaacacatgcaagtcgaacggatccttcgggattagtggcggacgggtgagtaacacgtgggaacgtgccctttggttcggaacaactcagggaaacttgagctaataccggatgtgcccttcgggggaaagatttatcgccattggagcggcccgcgtctgattagctagttggtgaggtaaaggctcaccaaggcgacgatcagtagctggtctgagaggatgatcagccacattgggactgagacacggcccaaactcctacgggaggcagcagtggggaatcttgcgcaatgggcgaaagcctgacgcagccatgccgcgtgaatgatgaaggtcttaggattgtaaaattctttcaccggggacgataatgacggtacccggagaagaagccccggctaacttcgtgccagcagccgcggtaatacgaagggggctagcgttgctcggaattactgggcgtaaagggagcgtaggcggactgtttagtcagaggtgaaagcccagggctcaaccttggaattgcctttgatactggcagtcttgagtacggaagaggtatgtggaactccgagtgtagaggtgaaattcgtagatattcggaagaacaccagtggcgaaggcgacatactggtccgttactgacgctgaggctcgaaagcgtggggagcaaacaggattagataccctggtagtccacgccgtaaacgatgagtgctagttgtcggcatgcatgcatgtcggtgacgcagctaacgcattaagcactccgcctggggagtacggtcgcaagattaaaactcaaaggaattgacgggggcccgcacaagcggtggagcatgtggtttaattcgaagcaacgcgcagaaccttaccaccttttgacatgcctggaccgccacagagatgtggttttcccttcggggactgggacacaggtgctgcatggctgtcgtcagctcgtgtcgtgagatgttgggttaagtcccgcaacgagcgcaaccctcgtgattagttgccatcaggtttggctgggcactctaatcatactgccggagttaatccggaggaaggcggggatgacgtcaagtcctcatggcccttacaaggtgggctacacacgtgctacaatggcgactacagagggctgcaatcccgcgagggggagccaatccctaaaagtcgtctcagttcggattgttctctgcaactcgagagcatgaagttggaatcgctagtaatcgcggatcagcatgccgcggtgaatacgttcccgggccttgtacacaccgcccgtcacaccatgggagttggctttacccgaaggcgctgcgctaaccgcaagggggcaggcgaccacggtagggtcagcgactggggtgaagtcgtaacaaggtagccgtaggggaacctgcggctggatcatgtggtttccttaaagaagcgtactttgtagtgctcacacagattgtctgatagaaagtgaaaagcaaggcgtttacgcgttgggagtgaggctgaagagaataaggccgttcgctttctattaatgaaagctcaccctacacgaaaatatcacgcaacgcgtgataagcaattttcgtgtccccttcgtctagaggcccaggacaccgccctttcacggcggtaacaggggttcgaatcccctaggggacgccacttgctggtttgtgagtgaaagtcgccgaccttaatatctcaaaactcatcttcgggtgatgtttgagatatttgctctttaaaaatctggatcaagctgaaaattgaaacactgaacaacgagagttgttcgtgagtctctcaaattttcgcaacacgatgatgaatcgaaagaaacatcttcgggttgtgagatcaagcgcataagggcttctgacggatgccttggcattgagaggcgatgaaggacgtggcacgctgcgataagagccggggaggcgcgagcaccctttgatccggctatctccgaatggggaaacccacctttatggtcacccgactttgtttccgcttcggcggagacgacgatcggttgatcagacaaggtataatgacctgaatacatagggttcattaagcaaacccggggaactgaaacatctcagtacccggaggaaaggacatcaaccgagactcccgtagtagtggcgagcgaaccgggaccaggccagtgctgtcgtgacataaagctgaatgtgttgggaaacacagccatagtgggtgatagccccgtaagcgtcaaatagcgacagactcgagtagggcgggacacgtgaaatcctgtctgaacatggggggaccaccctccaagcctaagtactcctcaatgaccgatagcgaacaagtaccgtgagggaaaggtgaaaagcaccccgacaaggggagtgaaacagaacctgaaatcggaagcctacaagcagtcggagccaccgcgcgtggtgacggcgtaccttttgtataatgggtcagcgacttcatgtgccgtgcaagcttaagccgttaggtgtaggcgcagcgaaagcgagtctgaatagggcgaataagtacgtcgcatgacgacccgaaaccaggtgatctatccatgagcaggttgaaggtaaggtaacacttactggaggaccgaaccggtgaatgttgaaaaattctcggatgacttgtggataggggtgaaaggccaatcaaacctggacatagctggttctccgcgaaaactatttaggtagtgcctcggacgaattccttggggggtagagcactgaatggatgcgggcggcgcgagctgtaccaattctaatcaaactccgaatacccaagagaaatatccgggagacacacggcgggtgctaacgtccgtcgtgaaaagggaaacaaccctaaccatcatctaaggcccccaagtactggctaagtgggaaacgatgtgggtttgctttgacaaccaggatgttggcttagaagcagccatcatttaaagaaagcgtaacagctcactggtcaagcgaacctgcgcggaaaatgtaacggggctaaagccagtcgccgaaggtatgggtgtgcactctgtgcacgcggtagcggagcgttccgtaagccgatgaaggtgaggcgtgagccttgctggaggtatcggaagtgagaatgctgacatgagtagcgataaagagggtgagagaccctctcgccgaaagcccaagggttcctgcgtaaagctaatctgcgcagggttagtcggcccctaaggcgaggccgaaaggcgtagtcgatgggaatcaggtgaatattcctgaaccagttggaagtgacggatctggtaaattgtcagggcttattggattgctcctggcagtgaacaggtccctggaaataactccaacggagaccgtacccgaaaccgacacaggtgggcaggtagagtataccaaggcgcttgagagaactatgctgaaggaactcggcaaattgcacgcgtaacttcgggataagcgtgactctcttttgggcaaccagatgagagtggcacaagccagggggtagcgactgtttatcaaaaacacagggctctgcgaagccgcaaggcgacgtatagggtctgacgcctgcccggtgcctgaaggttaaaaggaggggtgcaagctctgaattgaagcccaggtaaacggcggccgtaactataacggtcctaaggtagcgaaattccttgtcgggtaagttccgacctgcacgaatggcgtaacgacttccccactgtctccagcataggctcagcgaaattgaattccccgtgaagatgcggggttcccgcggtcagacggaaagaccctatgaacctttactgcagcttcgccttggcgttagcagcaacatgtgtaggataggtgggaggctatgaaactcgggcgccagttcgagtggagccatccttgaaataccacccttattgttgctgacgtctaaccgcggcccgttatccgggtccgggacatggcgtggcgggcagtttgactggggcggtcgcctcccaaagtgtaacggaggcgcgcgatggtgggctcagaccggtcggaaatcggtcgtcgagtgcaatggcataagcccgcctgactgcgagactgacaagtcgagcagagacgaaagtcggccatagtgatccggtggtcctgcgtggaagggccatcgctcaacgaataaaaggtactctagggataacaggctgattttgcccaagagtccatatcgacggcaaagtttggcacctcgatgtcggctcatcacatcctggggctggagcaggtcccaagggttcggctgttcgccgattaaagtggtacgtgagctgggttcagaacgtcgtgagacagtttggtccctatctgccgtgggtgtacgagacttgagaggatctgtccctagtacgagaggaccgggatggacacacctctggtggacctgtcatggcgccagctgtgcagcagggtagctaagtgtggaatagataaccgctgaaagcatctaagcgggaaactaacctcaaaacaaggtctcgctgagagccgtggaagaccaccacgttgataggccgggtgtggaagtgcggtgacgcatggagcttaccggtactaatagctcgataggcttgatcgtacaacgccgaagctgttttggcggatgagagaagattttcagcctgatacagattaaatcagaacgcagaagcggtctgataaaacagaattgacctggtggctatgccgggggttccccacccgatcccattccgaactcggtcgttaagtccccctgggccaatggtacttcgtctcaaggcgcgggagagtaggtcgccgccaggtcccaaataaaacgaaaggctcagtcgaaagactgggcctttcgttttatctgttgtttgtcggtgaacgctctcctgagtaggacaaatccgccgggagcggatttgaacgttgcgaagcaacggcccggagggtggcgggcaggacgcccgccataaactgccaggcatcaaattaagcagaaggccatcctgacggatggcctttttgcgtttctacaaactcttcctgtcgtcatatctacaagccggcgcgccgggaaatgtgcgcggaacccctatttgtttatttttctaaatacattcaaatatgtatccgctcatgagacaataaccctgataaatgcttcaataatattgaaaaaggaagagtatgagtattcaacatttccgtgtcgcccttattcccttttttgcggcattttgccttcctgtttttgctcacccagaaacgctggtgaaagtaaaagatgctgaagatcagttgggtgcacgagtgggttacatcgaactggatctcaacagcggtaagatccttgagagttttcgccccgaagaacgttttccaatgatgagcacttttaaagttctgctatgtggcgcggtattatcccgtgttgacgccgggcaagagcaactcggtcgccgcatacactattctcagaatgacttggttgagtactcaccagtcacagaaaagcatcttacggatggcatgacagtaagagaattatgcagtgctgcaataaccatgagtgataacactgcggccaacttacttctgacaacgatcggaggaccgaaggagctaaccgcttttttgcacaacatgggggatcatgtaactcgccttgatcgttgggaaccggagctgaatgaagccataccaaacgacgagcgtgacaccacgatgcctgcagcaatggcaacaacgttgcgcaaactattaactggcgaactacttactctagcttcccggcaacaattaatagactggatggaggcggataaagttgcaggaccacttctgcgctcggcccttccggctagctggtttattgctgataaatctggagccggtgagcgtgggtctcgcggtatcattgcagcactggggccagatggtaagccctcccgtatcgtagttatctacacgacggggagtcaggcaactatggatgaacgaaatagacagatcgctgagataggtgcctcactgattaagcattggtaactgcagaccaagtttactcatatatactttagattgatttaaaacttcatttttaatttaaaaggatctaggtgaagatcctttttgataatctcatgaccaaaatcccttaacgtgagttttcgttccactgagcgtcagaccccgtagaaaagatcaaaggatcttcttgagatcctttttttctgcgcgtaatctgctgcttgcaaacaaaaaaaccaccgctaccagcggtggtttgtttgccggatcaagagctaccaactctttttccgaaggtaactggcttcagcagagcgcagataccaaatactgtccttctagtgtagccgtagttaggccaccacttcaagaactctgtagcaccgcctacatacctcgctctgctaatcctgttaccagtggctgctgccagtggcgataagtcgtgtcttaccgggttggactcaagacgatagttaccggataaggcgcagcggtcgggctgaacggggggttcgtgcacacagcccagcttggagcgaacgacctacaccgaactgagatacctacagcgtgagctatgagaaagcgccacgcttcccgaagggagaaaggcggacaggtatccggtaagcggcagggtcggaacaggagagcgcacgagggagcttccagggggaaacgcctggtatctttatagtcctgtcgggtttcgccacctctgacttgagcgtcgatttttgtgatgctcgtcaggggggcggagcctatggaaaaacgccagcaacgcggcctttttacggttcctggccttttgctgg

SEQ ID NO: 14 - DNA, 7390 bp, Artificial
  Synthetic
agacttagggaccctgcggccgccattaattcctaatttttgttgacactctatcattgatagagttattttaccactccctatcagtgatagagaaaagtgaaatgaatagaccggccgctgagaaaaagcgaagcggcactgctctttaacaatttatcagacaatctgtgtgggcactcgaagatacggattcttaacgtcgcaagacgaaaaatgaataccaagtctcaagagtgaacacgtaattcattacgaagtttaattctttgagcgtcaaacttttaaactgaagagtttgatcctggctcagattgaacgctagcgggatgctttacacatgcaagtcgaacggcagcgcgagagagcttgctctcttggcggcgagtggcggacgggtgagtaatatatcggaacgtgcccagtagcgggggataactactcgaaagagtggctaataccgcatacgccctacgggggaaagggggggatcgcaagacctctcactattggagcggccgatatcggattagctagttggtggggtaaaggctcaccaaggcaacgatccgtagctggtttgagaggacgaccagccacactgggactgagacacggcccagactcctacgggaggcagcagtggggaattttggacaatgggggaaaccctgatccagccatcccgcgtgtatgatgaaggccttcgggttgtaaagtacttttggcagagaagaaaaggtacctcctaatacgaggtactgctgacggtatctgcagaataagcaccggctaactacgtgccagcagccgcggtaatacgtagggtgcaagcgttaatcggaattactgggcgtaaagcgtgtgtaggcggttcggaaagaaagatgtgaaatcccagggctcaaccttggaactgcatttttaactgccgagctagagtatgtcagaggggggtagaattccacgtgtagcagtgaaatgcgtagatatgtggaggaataccgatggcgaaggcagccccctgggataatactgacgctcagacacgaaagcgtggggagcaaacaggattagataccctggtagtccacgccctaaacgatgtcaactagctgttggggccgttaggccttagtagcgcagctaacgcgtgaagttgaccgcctggggagtacggtcgcaagattaaaactcaaaggaattgacggggacccgcacaagcggtggatgatgtggattaattcgatgcaacgcgaaaaaccttacctacccttgacatgtctggaaagccgaagagatttggccgtgctcgcaagagaaccggaacacaggtgctgcatggctgtcgtcagctcgtgtcgtgagatgttgggttaagtcccgcaacgagcgcaacccttgtcattagttgctacgcaagagcactctaatgagactgccggtgacaaaccggaggaaggtggggatgacgtcaagtcctcatggcccttatgggtagggcttcacacgtcatacaatggtcgggacagagggtcgccaacccgcgagggggagccaatctcagaaacccgatcgtagtccggatcgcagtctgcaactcgactgcgtgaagtcggaatcgctagtaatcgcggatcagaatgtcgcggtgaatacgttcccgggtcttgtacacaccgcccgtcacaccatgggagtgggtttcaccagaagtaggtagcctaaccgtaaggagggcgcttaccacggtgggattcatgactggggtgaagtcgtaacaaggtagccgtatcggaaggtgcggctggatcatgtggtttccttaaagaagcgtactttgtagtgctcacacagattgtctgatagaaagtgaaaagcaaggcgtttacgcgttgggagtgaggctgaagagaataaggccgttcgctttctattaatgaaagctcaccctacacgaaaatatcacgcaacgcgtgataagcaattttcgtgtccccttcgtctagaggcccaggacaccgccctttcacggcggtaacaggggttcgaatcccctaggggacgccacttgctggtttgtgagtgaaagtcgccgaccttaatatctcaaaactcatcttcgggtgatgtttgagatatttgctctttaaaaatctggatcaagctgaaaattgaaacactgaacaacgagagttgttcgtgagtctctcaaattttcgcaacacgatgatgaatcgaaagaaacatcttcgggttgtgagatcaagcgaataagtgcatatgatggatgccttggcgatcacaggcgatgaaggacgcggtagcctgcgaaaagctacggggagctggcaaacaagctttgatccgtagatgtccgaatggggaaacccaccgtagtaatacggtatcccatgctcaatacataggcatgtggaggcgaaccgagtgaactgaaccatctcagtaactcgaggaaaagaaatcaaccgagattccggaagtagtggcgagcgaaaccggaccagcctggatgttttagcgtagtgaatagtcgaatggaatggaaagtccagccgtagcaggtgatagccctgtaggcgaaattcagtacgtggaactaagcatcgaacaagtagggcgggacacgtgaaatcctgtctgaatatggggggaccatcctccaaggctaaatactcgtgatcgaccgatagtgaaccagtaccgtgagggaaaggcgaaaagaaccccggaaggggagtgaaatagatcctgaaatcgtatgcatacaaacagtaggagcaccttcgtggtgtgactgcgtaccttttgtataatgggtcagcgacttacattcagtggcaagcttaaccgaataggggaggcgtagcgaaagcgagtccgaatagggcgattcagtcgctgggtgtagacccgaaaccaggcgatctatccatggccaggttgaaggcacggtaacacgtgctggaggaccgaacccactaatgttgaaaaattaggggatgagctgtggatcggagtgaaaggctaaacaagcctggagatagctggttctctccgaaaactatttaggtagtgcctcgtatattactgccgggggtagagcactgttatggctagggggtcacagcgacttaccaacccatggcaaactccgaataccggcaagtacagtacgggagacagagcaccgggtgctaacgtccggactcaagagggaaacaacccagaccgccagctaaggtccctaactatggctaagtgggaaacgaagtgggaaggcatagacagtcaggaggttggcttagaagcagccatcctttaaagaaagcgtaatagctcactgatcgagtcgtcctgcgcggaagatgtaacggggctaagccatagaccgaagctgcggatgtgtactatgtacacatggtaggagagcgttccgtaagcctgtgaaggtgttccgtgaggaatgctggaggtatcggaagtgagaatgctgacatgagtagcgataaagggggtgaaaagccccctcgccgtaagtccaaggtttcctgcgcaacgttcatcggcgcagggtgagtcggcccctaaggcgaggcagagatgcgtagctgatgggaagcgggttaatattcccgcaccgtcgtagagtgcgatggggggacggattgcagaatgttatcggggtgttggatgtccccgttggcgcatcatagaaggcacttaggcaaatccgggtgcgtaattcaagggtgtgactggatagagcttcggctctaaactaactggaagcagttccaagaaaagcctctaagcttcagctctacgagaccgtaccgcaaaccgacacaggtggacgggatgaatattccaaggcgcttgagagaactcaggagaaggaactcggcaaattaataccgtaacttcgggagaaggtatgcctcattagtgtgatgtgcctgcgcacaaagcatgaagaggccgcagtgaatcggtggctgcgactgtttactaaaaacacagcactctgcaaacacgaaagtggacgtatagggtgtgacgcctgcccggtgccggaaggttaagtgatggggtgcaagctcttgatcgaagccccggtaaacggcggccgtaactataacggtcctaaggtagcgaaattccttgtcgggtaagttccgacctgcacgaatggcgtaacgatggccacactgtctcctcctgagactcagcgaagttgacatggttgtgatgatgcaatctccccgcggctagacggaaagaccccatgaacctttactgtagctttgcattggattgtgaaccggcctgtgtaggataggtgggagacgttgaagcgtggtcgccagatcgcgtggagtcatccttgaaataccaccctggtctgtttgcggttctaacctaggtcccttatcgggatcggggaccgtgcatggtgggcagtttgactggggcggtctcctcctaaagtgtaacggaggagttcgaaggtacgctagagacggtcggaaatcgtcttgatagtgcaatggcataagcgtgcttgactgtgagactgacaagtcgaacaggtacgaaagtaggacatagtgatccggtggttctgtatggaagggccatcgctcaacggataaaaggtactctggggataacaggctgataccgcccaagagttcatatcgacggcggtgtttggcacctcgatgtcggctcatctcatcctggggctgtagccggtcccaagggtatggctgttcgccatttaaagaggtacgtgagctgggtttaaaacgtcgtgagacagtttggtccctatctgccgtgggcgttggatatttgacggagcctgctcctagtacgagaggaccggagtggacgtaccactggtgtatcggttgtcatgccaatggcattgccgagtagctacgtacggaagagataaccgctgaaggcatctaagcgggaaactcgtctgaagattagatatcccggaggcttgacctccctgtagggtcgtccgagaccaggacgttgataggctgggtgtggaagtgcagtaatgcatgtagctaaccagtactaattgcccgtgtggcttgatcctacaacgccgaagctgttttggcggatgagagaagattttcagcctgatacagattaaatcagaacgcagaagcggtctgataaaacagaatttcgcttgacgaccatagcgaggtggtcccacaccttcccatcccgaacaggattgtgaaacgcctttgcgccgatgatagtggacggacgtctgtgaaagtaggtcatcgtcaagctccaaataaaacgaaaggctcagtcgaaagactgggcctttcgttttatctgttgtttgtcggtgaacgctctcctgagtaggacaaatccgccgggagcggatttgaacgttgcgaagcaacggcccggagggtggcgggcaggacgcccgccataaactgccaggcatcaaattaagcagaaggccatcctgacggatggcctttttgcgtttctacaaactcttcctgtcgtcatatctacaagccggcgcgccgggaaatgtgcgcggaacccctatttgtttatttttctaaatacattcaaatatgtatccgctcatgagacaataaccctgataaatgcttcaataatattgaaaaaggaagagtatgagtattcaacatttccgtgtcgcccttattcccttttttgcggcattttgccttcctgtttttgctcacccagaaacgctggtgaaagtaaaagatgctgaagatcagttgggtgcacgagtgggttacatcgaactggatctcaacagcggtaagatccttgagagttttcgccccgaagaacgttttccaatgatgagcacttttaaagttctgctatgtggcgcggtattatcccgtgttgacgccgggcaagagcaactcggtcgccgcatacactattctcagaatgacttggttgagtactcaccagtcacagaaaagcatcttacggatggcatgacagtaagagaattatgcagtgctgcaataaccatgagtgataacactgcggccaacttacttctgacaacgatcggaggaccgaaggagctaaccgcttttttgcacaacatgggggatcatgtaactcgccttgatcgttgggaaccggagctgaatgaagccataccaaacgacgagcgtgacaccacgatgcctgcagcaatggcaacaacgttgcgcaaactattaactggcgaactacttactctagcttcccggcaacaattaatagactggatggaggcggataaagttgcaggaccacttctgcgctcggcccttccggctagctggtttattgctgataaatctggagccggtgagcgtgggtctcgcggtatcattgcagcactggggccagatggtaagccctcccgtatcgtagttatctacacgacggggagtcaggcaactatggatgaacgaaatagacagatcgctgagataggtgcctcactgattaagcattggtaactgcagaccaagtttactcatatatactttagattgatttaaaacttcatttttaatttaaaaggatctaggtgaagatcctttttgataatctcatgaccaaaatcccttaacgtgagttttcgttccactgagcgtcagaccccgtagaaaagatcaaaggatcttcttgagatcctttttttctgcgcgtaatctgctgcttgcaaacaaaaaaaccaccgctaccagcggtggtttgtttgccggatcaagagctaccaactctttttccgaaggtaactggcttcagcagagcgcagataccaaatactgtccttctagtgtagccgtagttaggccaccacttcaagaactctgtagcaccgcctacatacctcgctctgctaatcctgttaccagtggctgctgccagtggcgataagtcgtgtcttaccgggttggactcaagacgatagttaccggataaggcgcagcggtcgggctgaacggggggttcgtgcacacagcccagcttggagcgaacgacctacaccgaactgagatacctacagcgtgagctatgagaaagcgccacgcttcccgaagggagaaaggcggacaggtatccggtaagcggcagggtcggaacaggagagcgcacgagggagcttccagggggaaacgcctggtatctttatagtcctgtcgggtttcgccacctctgacttgagcgtcgatttttgtgatgctcgtcaggggggcggagcctatggaaaaacgccagcaacgcggcctttttacggttcctggccttttgctgg

SEQ ID NO: 15 - DNA, 7400 bp, Artificial
  Synthetic
agacttagggaccctgcggccgccattaattcctaatttttgttgacactctatcattgatagagttattttaccactccctatcagtgatagagaaaagtgaaatgaatagaccggccgctgagaaaaagcgaagcggcactgctctttaacaatttatcagacaatctgtgtgggcactcgaagatacggattcttaacgtcgcaagacgaaaaatgaataccaagtctcaagagtgaacacgtaattcattacgaagtttaattctttgagcgtcaaacttttgaactgaagagtttgatcatggctcagattgaacgctggcggcaggcctaacacatgcaagtcgagcggatgaagggagcttgctcctggattcagcggcggacgggtgagtaatgcctaggaatctgcctggtagtgggggataacgtccggaaacgggcgctaataccgcatacgtcctgagggagaaagtgggggatcttcggacctcacgctatcagatgagcctaggtcggattagctagttggtggggtaaaggcctaccaaggcgacgatccgtaactggtctgagaggatgatcagtcacactggaactgagacacggtccagactcctacgggaggcagcagtggggaatattggacaatgggcgaaagcctgatccagccatgccgcgtgtgtgaagaaggtcttcggattgtaaagcactttaagttgggaggaagggcagtaagttaataccttgctgttttgacgttaccaacagaataagcaccggctaacttcgtgccagcagccgcggtaatacgaagggtgcaagcgttaatcggaattactgggcgtaaagcgcgcgtaggtggttcagcaagttggatgtgaaatccccgggctcaacctgggaactgcatccaaaactactgagctagagtacggtagagggtggtggaatttcctgtgtagcggtgaaatgcgtagatataggaaggaacaccagtggcgaaggcgaccacctggactgatactgacactgaggtgcgaaagcgtggggagcaaacaggattagataccctggtagtccacgccgtaaacgatgtcgactagccgttgggatccttgagatcttagtggcgcagctaacgcgataagtcgaccgcctggggagtacggccgcaaggttaaaactcaaatgaattgacgggggcccgcacaagcggtggagcatgtggtttaattcgaagcaacgcgaagaaccttacctggccttgacatgctgagaactttccagagatggattggtgccttcgggaactcagacacaggtgctgcatggctgtcgtcagctcgtgtcgtgagatgttgggttaagtcccgtaacgagcgcaacccttgtccttagttaccagcacctcgggtgggcactctaaggagactgccggtgacaaaccggaggaaggtggggatgacgtcaagtcatcatggcccttacggccagggctacacacgtgctacaatggtcggtacaaagggttgccaagccgcgaggtggagctaatcccataaaaccgatcgtagtccggatcgcagtctgcaactcgactgcgtgaagtcggaatcgctagtaatcgtgaatcagaatgtcacggtgaatacgttcccgggccttgtacacaccgcccgtcacaccatgggagtgggttgctccagaagtagctagtctaaccgcaagggggacggttaccacggagtgattcatgactggggtgaagtcgtaacaaggtagccgtaggggaacctgcggctggatcatgtggttaccttaaagaagcgtactttgtagtgctcacacagattgtctgatagaaagtgaaaagcaaggcgtttacgcgttgggagtgaggctgaagagaataaggccgttcgctttctattaatgaaagctcaccctacacgaaaatatcacgcaacgcgtgataagcaattttcgtgtccccttcgtctagaggcccaggacaccgccctttcacggcggtaacaggggttcgaatcccctaggggacgccacttgctggtttgtgagtgaaagtcgccgaccttaatatctcaaaactcatcttcgggtgatgtttgagatatttgctctttaaaaatctggatcaagctgaaaattgaaacactgaacaacgagagttgttcgtgagtctctcaaattttcgcaacacgatgatgaatcgaaagaaacatcttcgggttgtgaggtcaagtgaagaagcgcatacggtggatgccttggcagtcagaggcgatgaaagacgtggtagcctgcgaaaagcttcggggagtcggcaaacagactttgatccggagatctctgaatgggggaacccacctaggataacctaggtatcttgtactgaatccataggtgcaagaggcgaaccaggggaactgaaacatctaagtaccctgaggaaaagaaatcaaccgagattcccttagtagtggcgagcgaacggggattagcccttaagcttcattgattttagcggaacgctctggaaagtgcggccatagtgggtgatagccccgtacgcgaaaggatctttgaagtgaaatcgagtaggacggagcacgagaaactttgtctgaacatggggggaccatcctccaaggctaaatactactgactgaccgatagtgaaccagtaccgtgagggaaaggcgaaaagaaccccggagaggggagtgaaatagaacctgaaaccgtatgcgtacaagcagtgggagcctacttgttaggtgactgcgtaccttttgtataatgggtcagcgacttatattcagtggcaagcttaaccgtatagggtaggcgtagcgaaagcgagtcttaatagggcgtttagtcgctgggtatagacccgaaaccgggcgatctatccatgagcaggttgaaggttaggtaacactgactggaggaccgaacccactcccgttgaaaaggtaggggatgacttgtggatcggagtgaaaggctaatcaagctcggagatagctggttctcctcgaaagctatttaggtagcgcctcatgtatcactctggggggtagagcactgtttcggctagggggtcatcccgacttaccaaaccgatgcaaactccgaatacccagaagtgccgagcatgggagacacacggcgggtgctaacgtccgtcgtgaaaagggaaacaacccagaccgccagctaaggtcccaaagttgtggttaagtggtaaacgatgtgggaaggcttagacagctaggaggttggcttagaagcagccaccctttaaagaaagcgtaatagctcactagtcgagtcggcctgcgcggaagatgtaacggggctcaaaccacacaccgaagctgcgggtgtcacgtaagtgacgcggtagaggagcgttctgtaagcctgtgaaggtgagttgagaagcttgctggaggtatcagaagtgcgaatgctgacatgagtaacgacaatgggtgtgaaaaacacccacgccgaaagaccaagggttcctgcgcaacgttaatcgacgcagggttagtcggttcctaaggcgaggctgaaaagcgtagtcgatgggaaacaggttaatattcctgtacttctggttactgcgatggagggacggagaaggctaggccagcttggcgttggttgtccaagtttaaggtggtaggctgaaatcttaggtaaatccggggtttcaaggccgagagctgatgacgagtcgtcttttagatgacgaagtggttgatgccatgcttccaagaaaagcttctaagcttcaggtaaccaggaaccgtaccccaaaccgacacaggtggtcgggtagagaataccaaggcgcttgagagaactcgggtgaaggaactaggcaaaatggcaccgtaacttcgggagaaggtgcgccggctagggtgaaggatttactccgtaagctctggctggtcgaagataccaggccgctgcgactgtttattaaaaacacagcactctgcaaacacgaaagtggacgtatagggtgtgacgcctgcccggtgccggaaggttaattgatggggttagcgcaagcgaagctcttgatcgaagccccggtaaacggcggccgtaactataacggtcctaaggtagcgaaattccttgtcgggtaagttccgacctgcacgaatggcgtaacgatggcggcgctgtctccacccgagactcagtgaaattgaaatcgctgtgaagatgcagtgtatccgcggctagacggaaagaccccgtgaacctttactgtagctttgcactggactttgagcctgcttgtgtaggataggtgggaggctttgaagcgtggacgccagttcgcgtggagccatccttgaaataccaccctggcatgcttgaggttctaactctggtccgtaatccggatcgaggacagtgtatggtgggcagtttgactggggcggtctcctcctaaagagtaacggaggagtacgaaggtgcgctcagaccggtcggaaatcggtcgcagagtataaaggcaaaagcgcgcttgactgcgagacagacacgtcgagcaggtacgaaagtaggtcttagtgatccggtggttctgtatggaagggccatcgctcaacggataaaaggtactccggggataacaggctgataccgcccaagagttcatatcgacggcggtgtttggcacctcgatgtcggctcatcacatcctggggctgaagccggtcccaagggtatggctgttcgccatttaaagtggtacgcgagctgggtttagaacgtcgtgagacagttcggtccctatctgccgtggacgtttgagatttgagaggggctgctcctagtacgagaggaccggagtggacgaacctctggtgttccggttgtcacgccagtggcattgccgggtagctatgttcggaaaagataaccgctgaaagcatctaagcgggaaacttgcctcaagatgagatctcactgggaacttgattcccctgaagggccgtcgaagactacgacgttgataggctgggtgtgtaagcgttgtgaggcgttgagctaaccagtactaattgcccgtgaggcttgaccatacaacgccgaagctgttttggcggatgagagaagattttcagcctgatacagattaaatcagaacgcagaagcggtctgataaaacagaattttgcttgacgatcatagagcgttggaaccacctgatcccttcccgaactcagaagtgaaacgacgcatcgccgatggtagtgtggggtctccccatgtgagagtaggtcatcgtcaagctccaaataaaacgaaaggctcagtcgaaagactgggcctttcgttttatctgttgtttgtcggtgaacgctctcctgagtaggacaaatccgccgggagcggatttgaacgttgcgaagcaacggcccggagggtggcgggcaggacgcccgccataaactgccaggcatcaaattaagcagaaggccatcctgacggatggcctttttgcgtttctacaaactcttcctgtcgtcatatctacaagccggcgcgccgggaaatgtgcgcggaacccctatttgtttatttttctaaatacattcaaatatgtatccgctcatgagacaataaccctgataaatgcttcaataatattgaaaaaggaagagtatgagtattcaacatttccgtgtcgcccttattcccttttttgcggcattttgccttcctgtttttgctcacccagaaacgctggtgaaagtaaaagatgctgaagatcagttgggtgcacgagtgggttacatcgaactggatctcaacagcggtaagatccttgagagttttcgccccgaagaacgttttccaatgatgagcacttttaaagttctgctatgtggcgcggtattatcccgtgttgacgccgggcaagagcaactcggtcgccgcatacactattctcagaatgacttggttgagtactcaccagtcacagaaaagcatcttacggatggcatgacagtaagagaattatgcagtgctgcaataaccatgagtgataacactgcggccaacttacttctgacaacgatcggaggaccgaaggagctaaccgcttttttgcacaacatgggggatcatgtaactcgccttgatcgttgggaaccggagctgaatgaagccataccaaacgacgagcgtgacaccacgatgcctgcagcaatggcaacaacgttgcgcaaactattaactggcgaactacttactctagcttcccggcaacaattaatagactggatggaggcggataaagttgcaggaccacttctgcgctcggcccttccggctagctggtttattgctgataaatctggagccggtgagcgtgggtctcgcggtatcattgcagcactggggccagatggtaagccctcccgtatcgtagttatctacacgacggggagtcaggcaactatggatgaacgaaatagacagatcgctgagataggtgcctcactgattaagcattggtaactgcagaccaagtttactcatatatactttagattgatttaaaacttcatttttaatttaaaaggatctaggtgaagatcctttttgataatctcatgaccaaaatcccttaacgtgagttttcgttccactgagcgtcagaccccgtagaaaagatcaaaggatcttcttgagatcctttttttctgcgcgtaatctgctgcttgcaaacaaaaaaaccaccgctaccagcggtggtttgtttgccggatcaagagctaccaactctttttccgaaggtaactggcttcagcagagcgcagataccaaatactgtccttctagtgtagccgtagttaggccaccacttcaagaactctgtagcaccgcctacatacctcgctctgctaatcctgttaccagtggctgctgccagtggcgataagtcgtgtcttaccgggttggactcaagacgatagttaccggataaggcgcagcggtcgggctgaacggggggttcgtgcacacagcccagcttggagcgaacgacctacaccgaactgagatacctacagcgtgagctatgagaaagcgccacgcttcccgaagggagaaaggcggacaggtatccggtaagcggcagggtcggaacaggagagcgcacgagggagcttccagggggaaacgcctggtatctttatagtcctgtcgggtttcgccacctctgacttgagcgtcgatttttgtgatgctcgtcaggggggcggagcctatggaaaaacgccagcaacgcggcctttttacggttcctggccttttgctgg

SEQ ID NO: 16 - DNA, 7507 bp, Artificial
  Synthetic
agacttagggaccctgcggccgccattaattcctaatttttgttgacactctatcattgatagagttattttaccactccctatcagtgatagagaaaagtgaaatgaatagaccggccgctgagaaaaagcgaagcggcactgctctttaacaatttatcagacaatctgtgtgggcactcgaagatacggattcttaacgtcgcaagacgaaaaatgaataccaagtctcaagagtgaacacgtaattcattacgaagtttaattctttgagcgtcaaacttttaaattgaagagtttgatcatggctcagattgaacgctggcggcaggcctaacacatgcaagtcgaacggtaacaggaagcagcttgctgcttcgctgacgagtggcggacgggtgagtaatgtctgggaaactgcctgatggagggggataactactggaaacggtggctaataccgcataacgtcgcaagaccaaagagggggaccttcgggcctcttgccatcagatgtgcccagatgggattagctagttggtgaggtaacggctcaccaaggcgacgatccctagctggtctgagaggatgaccagccacactggaactgagacacggtccagactcctacgggaggcagcagtggggaatattgcacaatgggcgcaagcctgatgcagccatgccgcgtgtatgaagaaggccttcgggttgtaaagtactttcagcggggaggaaggtgttgtggttaataaccgcagcaattgacgttacccgcagaagaagcaccggctaactccgtgccagcagccgcggtaatacggagggtgcaagcgttaatcggaattactgggcgtaaagcgcacgcaggcggtctgtcaagtcggatgtgaaatccccgggctcaacctgggaactgcattcgaaactggcaggcttgagtcttgtagaggggggtagaattccaggtgtagcggtgaaatgcgtagagatctggaggaataccggtggcgaaggcggccccctggacaaagactgacgctcaggtgcgaaagcgtggggagcaaacaggattagataccctggtagtccacgccgtaaacgatgtctacttggaggttgtgcccttgaggcgtggcttccggagctaacgcgttaagtagaccgcctggggagtacggccgcaaggttaaaactcaaatgaattgacgggggcccgcacaagcggtggagcatgtggtttaattcgatgcaacgcgaagaaccttacctggtcttgacatccacagaactttccagagatggattggtgccttcgggaactgtgagacaggtgctgcatggctgtcgtcagctcgtgttgtgaaatgttgggttaagtcccgcaacgagcgcaacccttatcctttgttgccagcgattaggtcgggaactcaaaggagactgccagtgataaactggaggaaggtggggatgacgtcaagtcatcatggcccttacgaccagggctacacacgtgctacaatggcgcatacaaagagaagcgacctcgcgagagcaagcggacctcataaagtgcgtcgtagtccggattggagtctgcaactcgactccatgaagtcggaatcgctagtaatcgtggatcagaatgccacggtgaatacgttcccgggccttgtacacaccgcccgtcacaccatgggagtgggttgcaaaagaagtaggtagcttaaccttcgggagggcgcttaccactttgtgattcatgactggggtgaagtcgtaacaaggtaaccgtaggggaacctgcggttggatcatgtggttaccttaaagaagcgtactttgtagtgctcacacagattgtctgatagaaagtgaaaagcaaggcgtttacgcgttgggagtgaggctgaagagaataaggccgttcgctttctattaatgaaagctcaccctacacgaaaatatcacgcaacgcgtgataagcaattttcgtgtccccttcgtctagaggcccaggacaccgccctttcacggcggtaacaggggttcgaatcccctaggggacgccacttgctggtttgtgagtgaaagtcgccgaccttaatatctcaaaactcatcttcgggtgatgtttgagatatttgctctttaaaaatctggatcaagctgaaaattgaaacactgaacaacgagagttgttcgtgagtctctcaaattttcgcaacacgatgatgaatcgaaagaaacatcttcgggttgtgaggttaagcgactaagcgtacacggtggatgccctggcagtcagaggcgatgaagggcgtgctaatctgcgataagcgccggtaaggtgatatgaaccgttataaccggcgatacccgaatggggaaacccagtgtgattcgtcacactatcattaactgaatccataggttaatgaggcgaaccgggggaactgaaacatctaagtaccccgaggaaaagaaatcaaccgagattcccccagtagcggcgagcgaacggggaggagcccagagcctgaatcagcatgtgtgttagtggaagcgtctggaaaggtgcgcgatacagggtgacagccccgtacacaaaagcgcatgtgctgtgagctcgatgagtagggcgggacacgtggtatcctgtctgaatatggggggaccatcctccaaggctaaatactcctgactgaccgatagtgaaccagtaccgtgagggaaaggcgaaaagaaccccggcgaggggagtgaaaaagaacctgaaaccgtgtacgtacaagcagtgggagcacaggtttacctgtgtgactgcgtaccttttgtataatgggtcagcgacttatattctgtagcaaggttaaccgtataggggagccgtagggaaaccgagtcttaaccgggcgttaagttgcagggtatagacccgaaacccggtgatctagccatgggcaggttgaaggttgggtaacactaactggaggaccgaaccgactaatgttgaaaaattagcggatgacctgtggctgggggtgaaaggccaatcaaaccgggagatagctggttctccccgaaagctatttaggtagcgcctcgtgaattcatctccgggggtagagcactgtttcggctagggggccatcccggcttaccaacccgatgcaaactgcgaataccggagaatgttatcacgggagacacacggcgggtgctaacgtccgtcgtgaagagggaaacaacccagaccgccagctaaggtcccaaagtcatggttaagtgggaaacgatgtgggaaggcccagacagccaggatgttggcttagaagcagccatcatttaaagaaagcgtaatagctcactggtcgagtcggcctgcgcggaagatgtaacggggctaaaccatgcaccgaagctgcggcagcgaacgtatcacccaagacaactttacggagttgacgattgacggagcgaagcgacgtcaaagcgttcattaaagtcgagttggcttagggatacgttcgttgggtaggggagcgttctgtaagcctgtgaaggtgtgtcgtgaggcatgctggaggtatcagaagtgcgaatgctgacataagtaacgataaagcgggtgaaaagcccgctcgccggaagaccaagggttcctgtccaacgttaatcggggcagggtgagtcgacccctaaggcgaggccgaaaggcgtagtcgatgggaaacgggttaatattcccgtacttggtgttactgcgaaggggggacggagaaggctatgttggccgggcgacggttgtcccggtttaagcgtgtaggtgtgtgttccaggtaaatccggttcactttaacactgaggcgtgacgacgaggcactacggtgctgaagcaacaaatgccctgcttccaggaaaagcctctaagcatcaggtaacacgaaatcgtaccccaaaccgacacaggtggtcaggtagagaataccaaggcgcttgagagaactcgggtgaaggaactaggcaaaatggtgccgtaacttcgggagaaggcacgctgacacgtaggtgaagtgatttactcatggagctgaagtcagtcgaagataccagctggctgcaactgtttattaaaaacacagcactgtgcaaacacgaaagtggacgtatacggtgtgacgcctgcccggtgccggaaggttaattgatggggtcagcgcaagcgaagctcctgatcgaagccccggtaaacggcggccgtaactataacggtcctaaggtagcgaaattccttgtcgggtaagttccgacctgcacgaatggcgtaatgatggccaggctgtctccacccgagactcagtgaaattgaactcgctgtgaagatgcagtgtacccgcggcaagacggaaagaccccgtgaacctttactatagcttgacactgaacattgagccttgatgtgtaggataggtgggaggctttgaagtgtggacgccagtctgcatggagccgaccttgaaataccaccctttaatgtttgatgttctaacgtggacccgtaatccgggttgcggacagtgtctggtgggtagtttgactggggcggtctcctcctaaagagtaacggaggagcacgaaggttggctaatcctggtcggacatcaggaggttagtgcaatggcataagccagcttgactgcgagcgtgacggcgcgagcaggtgcgaaagcaggtcatagtgatccggtggttctgaatggaagggccatcgctcaacggataaaaggtactccggggataacaggctgataccgcccaagagttcatatcgacggcggtgtttggcacctcgatgtcggctcatcacatcctggggctgaagtaggtcccaagggtatggctgttcgccatttaaagtggtacgcgagctgggtttagaacgtcgtgagacagttcggtccctatctgccgtgggcgctggagaactgaggggggctgctcctagtacgagaggaccggagtggacgcatcactggtgttcgggttgtcatgccaatggcactgcccggtagctaaatgcggaagagataagtgctgaaagcatctaagcacgaaacttgccccgagatgagttctccctgagacttagagtctcctgaaggaacgttgaagacgacgacgttgataggccgggtgtgtaagcgcagcgatgcgttgagctaaccggtactaatgaaccgtgaggcttaaccttacaacgccgaagctgttttggcggatgagagaagattttcagcctgatacagattaaatcagaacgcagaagcggtctgataaaacagaattttgcctggcggccgtagcgcggtggtcccacctgaccccatgccgaactcagaagtgaaacgccgtagcgccgatggtagtgtggggtctccccatgcgagagtagggaactgccaggcatcaaataaaacgaaaggctcagtcgaaagactgggcctttcgttttatctgttgtttgtcggtgaacgctctcctgagtaggacaaatccgccgggagcggatttgaacgttgcgaagcaacggcccggagggtggcgggcaggacgcccgccataaactgccaggcatcaaattaagcagaaggccatcctgacggatggcctttttgcgtttctacaaactcttcctgtcgtcatatctacaagccggcgcgccgggaaatgtgcgcggaacccctatttgtttatttttctaaatacattcaaatatgtatccgctcatgagacaataaccctgataaatgcttcaataatattgaaaaaggaagagtatgagtattcaacatttccgtgtcgcccttattcccttttttgcggcattttgccttcctgtttttgctcacccagaaacgctggtgaaagtaaaagatgctgaagatcagttgggtgcacgagtgggttacatcgaactggatctcaacagcggtaagatccttgagagttttcgccccgaagaacgttttccaatgatgagcacttttaaagttctgctatgtggcgcggtattatcccgtgttgacgccgggcaagagcaactcggtcgccgcatacactattctcagaatgacttggttgagtactcaccagtcacagaaaagcatcttacggatggcatgacagtaagagaattatgcagtgctgcaataaccatgagtgataacactgcggccaacttacttctgacaacgatcggaggaccgaaggagctaaccgcttttttgcacaacatgggggatcatgtaactcgccttgatcgttgggaaccggagctgaatgaagccataccaaacgacgagcgtgacaccacgatgcctgcagcaatggcaacaacgttgcgcaaactattaactggcgaactacttactctagcttcccggcaacaattaatagactggatggaggcggataaagttgcaggaccacttctgcgctcggcccttccggctagctggtttattgctgataaatctggagccggtgagcgtgggtctcgcggtatcattgcagcactggggccagatggtaagccctcccgtatcgtagttatctacacgacggggagtcaggcaactatggatgaacgaaatagacagatcgctgagataggtgcctcactgattaagcattggtaactgcagaccaagtttactcatatatactttagattgatttaaaacttcatttttaatttaaaaggatctaggtgaagatcctttttgataatctcatgaccaaaatcccttaacgtgagttttcgttccactgagcgtcagaccccgtagaaaagatcaaaggatcttcttgagatcctttttttctgcgcgtaatctgctgcttgcaaacaaaaaaaccaccgctaccagcggtggtttgtttgccggatcaagagctaccaactctttttccgaaggtaactggcttcagcagagcgcagataccaaatactgtccttctagtgtagccgtagttaggccaccacttcaagaactctgtagcaccgcctacatacctcgctctgctaatcctgttaccagtggctgctgccagtggcgataagtcgtgtcttaccgggttggactcaagacgatagttaccggataaggcgcagcggtcgggctgaacggggggttcgtgcacacagcccagcttggagcgaacgacctacaccgaactgagatacctacagcgtgagctatgagaaagcgccacgcttcccgaagggagaaaggcggacaggtatccggtaagcggcagggtcggaacaggagagcgcacgagggagcttccagggggaaacgcctggtatctttatagtcctgtcgggtttcgccacctctgacttgagcgtcgatttttgtgatgctcgtcaggggggcggagcctatggaaaaacgccagcaacgcggcctttttacggttcctggccttttgctgg

SEQ ID NO: 17 - DNA, 7403 bp, Artificial
  Synthetic
agacttagggaccctgcggccgccattaattcctaatttttgttgacactctatcattgatagagttattttaccactccctatcagtgatagagaaaagtgaaatgaatagaccggccgctgagaaaaagcgaagcggcactgctctttaacaatttatcagacaatctgtgtgggcactcgaagatacggattcttaacgtcgcaagacgaaaaatgaataccaagtctcaagagtgaacacgtaattcattacgaagtttaattctttgagcgtcaaactttttaattgaagagtttgatcatggctcagattgaacgctggcggcaggcctaacacatgcaagtcgagcggcagcacagaggaacttgttccttgggtggcgagcggcggacgggtgagtaatgcctgggaaattgcccggtagagggggataaccattggaaacgatggctaataccgcataacctcgcaagagcaaagcaggggaccttcgggccttgcgctaccggatatgcccaggtgggattagctagttggtgaggtaagggctcaccaaggcgacgatccctagctggtctgagaggatgatcagccacactggaactgagacacggtccagactcctacgggaggcagcagtggggaatattgcacaatgggcgcaagcctgatgcagccatgccgcgtgtatgaagaaggccttcgggttgtaaagtactttcagtagggaggaaggtggttaagttaataccttaatcatttgacgttacctacagaagaagcaccggctaactccgtgccagcagccgcggtaatacggagggtgcaagcgttaatcggaattactgggcgtaaagcgcatgcaggtggtttgttaagtcagatgtgaaagccctgggctcaacctaggaatcgcatttgaaactgacaagctagagtactgtagaggggggtagaatttcaggtgtagcggtgaaatgcgtagagatctgaaggaataccggtggcgaaggcggccccctggacagatactgacactcagatgcgaaagcgtggggagcaaacaggattagataccctggtagtccacgccgtaaacgatgtctacttggaggttgtgacctagagtcgtggctttcggagctaacgcgttaagtagaccgcctggggagtacggtcgcaagattaaaactcaaatgaattgacgggggcccgcacaagcggtggagcatgtggtttaattcgatgcaacgcgaagaaccttacctactcttgacatccagagaatctagcggagacgctggagtgccttcgggagctctgagacaggtgctgcatggctgtcgtcagctcgtgttgtgaaatgttgggttaagtcccgcaacgagcgcaacccttatccttgtttgccagcacgtaatggtgggaactccagggagactgccggtgataaaccggaggaaggtggggacgacgtcaagtcatcatggcccttacgagtagggctacacacgtgctacaatggcgtatacagagggcagcgataccgcgaggtggagcgaatctcacaaagtacgtcgtagtccggattggagtctgcaactcgactccatgaagtcggaatcgctagtaatcgcaaatcagaatgttgcggtgaatacgttcccgggccttgtacacaccgcccgtcacaccatgggagtgggctgcaaaagaagcaggtagtttaaccttcgggaggacgcttgccactttgtggttcatgactggggtgaagtcgtaacaaggtagcgctaggggaacctggcgctggatcatgtggttaccttaaagaagcgtactttgtagtgctcacacagattgtctgatagaaagtgaaaagcaaggcgtttacgcgttgggagtgaggctgaagagaataaggccgttcgctttctattaatgaaagctcaccctacacgaaaatatcacgcaacgcgtgataagcaattttcgtgtccccttcgtctagaggcccaggacaccgccctttcacggcggtaacaggggttcgaatcccctaggggacgccacttgctggtttgtgagtgaaagtcgccgaccttaatatctcaaaactcatcttcgggtgatgtttgagatatttgctctttaaaaatctggatcaagctgaaaattgaaacactgaacaacgagagttgttcgtgagtctctcaaattttcgcaacacgatgatgaatcgaaagaaacatcttcgggttgtgaggttaagtgactaagcgtacacggtggatgcctgggcagtcagaggcgatgaaggacgtactaacttgcgataagcgcagataaggcagtaagagccgtttgagtctgcgatttccgaatggggaaacccaactgcataagcagttactgttaactgaatacataggttaacagagcaaaccgggggaactgaaacatctaagtaccccgaggagaagaaatcaaccgagattccggtagtagcggcgagcgaacctggattagcccttaagcactcggtgaagtaggtgaacaagctggaaagcttggcgatacagggtgatagccccgtaaccgacgcttcatcgagcgtgaaatcgagtagggcgggacacgtgatatcctgtctgaatatggggggaccatcctccaaggctaaatactcctgactgaccgatagtgaaccagtaccgtgagggaaaggcgaaaagaacccctgtgaggggagtgaaatagaacctgaaaccgtgtacgtacaagcagtaggagcaccttcgtggtgtgactgcgtaccttttgtataatgggtcagcgacttatattcagtggcaaggttaaccgtataggggagccgtagcgaaagcgagtcttaattgggcgctcagtctctggatatagacccgaaaccgggtgatctagccatgggcaggttgaaggttgagtaacatcaactggaggaccgaaccgactaatgttgaaaaattagcggatgacttgtggctaggggtgaaaggccaatcaaactcggagatagctggttctccccgaaagctatttaggtagcgcctcggacgaatactactgggggtagagcactgttaaggctagggggtcatcccgacttaccaaccctttgcaaactccgaataccagtaagtactatccgggagacacacggcgggtgctaacgtccgtcgtggagagggaaacaacccagaccgccagctaaggtcccaaagtattgctaagtgggaaacgatgtgggaaggctcagacagctaggatgttggcttagaagcagccatcatttaaagaaagcgtaatagctcactagtcgagtcggcctgcgcggaagatgtaacggggctaagcaatacaccgaagctgcggcaatgtcttttagatattgggtaggggagcgttctgtaagccgttgaaggtgaatcgtaaggtttgctggaggtatcagaagtgcgaatgctgacatgagtaacgacaaagggggtgaaaaacctcctcgccggaagaccaagggttcctgtccaacgttaatcggggcagggtgagtcgacccctaaggtgaggccgaaaggcgtaatcgatgggaaacgggttaatattcccgtacttctgactattgcgatggggggacggagaaggctaggtgggccaggcgacggttgtcctggttcaagtgcgtaggcttgagagttaggtaaatccggctctctttaaggctgagacacgacgtcgagctgctacggcagtgaagtcattgatgccatgcttccaggaaaagcctctaagcttcagatagtcaggaatcgtaccccaaaccgacacaggtggtcgggtagagaataccaaggcgcttgagagaactcgggtgaaggaactaggcaaaatggtaccgtaacttcgggagaaggtacgctcttgatggtgaagtccctcgcggatggagctgacgagagtcgcagataccaggtggctgcaactgtttattaaaaacacagcactgtgcaaaatcgcaagatgacgtatacggtgtgacgcctgcccggtgccggaaggttaattgatggggttagcgcaagcgaagctcttgatcgaagccccggtaaacggcggccgtaactataacggtcctaaggtagcgaaattccttgtcgggtaagttccgacctgcacgaatggcgtaatgatggccacgctgtctccacccgagactcagtgaaattgaaatcgctgtgaagatgcagtgtacccgcggctagacggaaagaccccgtgaacctttactacagcttggcactgaacattgaacctacatgtgtaggataggtgggagtctatgaagacgtgacgccagttgcgttggagccgtccttgaaataccacccttgtatgtttgatgttctaacgttggcccctaatcggggttgcggacagtgcctggtgggtagtttgactggggcggtctcctcccaaagagtaacggaggagcacgaaggtgggctaatcacggttggacatcgtgaggttagtgcaatggcataagcccgcttaactgcgagaatgacggttcgagcaggtgcgaaagcaggtcatagtgatccggtggttctgtatggaagggccatcgctcaacggataaaaggtactccggggataacaggctgataccgcccaagagttcatatcgacggcggtgtttggcacctcgatgtcggctcatcacatcctggggctgaagtcggtcccaagggtatggctgttcgccatttaaagtggtacgcgagctgggtttagaacgtcgtgagacagttcggtccctatctgccgtgggcgttggaagattgaagggggctgctcctagtacgagaggaccggagtggacgaacctctggtgttcgggttgtgtcgccagacgcattgcccggtagctaagttcggaattgataagcgctgaaagcatctaagcgcgaagcgagccctgagatgagtcttccctgacggtttaaccgtcctaaagggttgttcgagactagaacgttgataggcagggtgtgtaagcgttgtgaggcgttgagctaacctgtactaattgcccgtgaggcttaaccatacaacgccgaagctgttttggcggatgagagaagattttcagcctgatacagattaaatcagaacgcagaagcggtctgataaaacagaattttgcttggcgaccatagcgttttggacccacctgactccatcccgaactcagaagtgaaacgaaacagcgtcgatggtagtgtggggtctccccatgtgagagtagaacatcgccaggcttcaaataaaacgaaaggctcagtcgaaagactgggcctttcgttttatctgttgtttgtcggtgaacgctctcctgagtaggacaaatccgccgggagcggatttgaacgttgcgaagcaacggcccggagggtggcgggcaggacgcccgccataaactgccaggcatcaaattaagcagaaggccatcctgacggatggcctttttgcgtttctacaaactcttcctgtcgtcatatctacaagccggcgcgccgggaaatgtgcgcggaacccctatttgtttatttttctaaatacattcaaatatgtatccgctcatgagacaataaccctgataaatgcttcaataatattgaaaaaggaagagtatgagtattcaacatttccgtgtcgcccttattcccttttttgcggcattttgccttcctgtttttgctcacccagaaacgctggtgaaagtaaaagatgctgaagatcagttgggtgcacgagtgggttacatcgaactggatctcaacagcggtaagatccttgagagttttcgccccgaagaacgttttccaatgatgagcacttttaaagttctgctatgtggcgcggtattatcccgtgttgacgccgggcaagagcaactcggtcgccgcatacactattctcagaatgacttggttgagtactcaccagtcacagaaaagcatcttacggatggcatgacagtaagagaattatgcagtgctgcaataaccatgagtgataacactgcggccaacttacttctgacaacgatcggaggaccgaaggagctaaccgcttttttgcacaacatgggggatcatgtaactcgccttgatcgttgggaaccggagctgaatgaagccataccaaacgacgagcgtgacaccacgatgcctgcagcaatggcaacaacgttgcgcaaactattaactggcgaactacttactctagcttcccggcaacaattaatagactggatggaggcggataaagttgcaggaccacttctgcgctcggcccttccggctagctggtttattgctgataaatctggagccggtgagcgtgggtctcgcggtatcattgcagcactggggccagatggtaagccctcccgtatcgtagttatctacacgacggggagtcaggcaactatggatgaacgaaatagacagatcgctgagataggtgcctcactgattaagcattggtaactgcagaccaagtttactcatatatactttagattgatttaaaacttcatttttaatttaaaaggatctaggtgaagatcctttttgataatctcatgaccaaaatcccttaacgtgagttttcgttccactgagcgtcagaccccgtagaaaagatcaaaggatcttcttgagatcctttttttctgcgcgtaatctgctgcttgcaaacaaaaaaaccaccgctaccagcggtggtttgtttgccggatcaagagctaccaactctttttccgaaggtaactggcttcagcagagcgcagataccaaatactgtccttctagtgtagccgtagttaggccaccacttcaagaactctgtagcaccgcctacatacctcgctctgctaatcctgttaccagtggctgctgccagtggcgataagtcgtgtcttaccgggttggactcaagacgatagttaccggataaggcgcagcggtcgggctgaacggggggttcgtgcacacagcccagcttggagcgaacgacctacaccgaactgagatacctacagcgtgagctatgagaaagcgccacgcttcccgaagggagaaaggcggacaggtatccggtaagcggcagggtcggaacaggagagcgcacgagggagcttccagggggaaacgcctggtatctttatagtcctgtcgggtttcgccacctctgacttgagcgtcgatttttgtgatgctcgtcaggggggcggagcctatggaaaaacgccagcaacgcggcctttttacggttcctggccttttgctgg

SEQ ID NO: 18 - DNA, 7421 bp, Artificial
  Synthetic
agacttagggaccctgcggccgccattaattcctaatttttgttgacactctatcattgatagagttattttaccactccctatcagtgatagagaaaagtgaaatgaatagaccggccgctgagaaaaagcgaagcggcactgctctttaacaatttatcagacaatctgtgtgggcactcgaagatacggattcttaacgtcgcaagacgaaaaatgaataccaagtctcaagagtgaacacgtaattcattacgaagtttaattctttgagcgtcaaactttttaattgaagagtttgatcatggctcagattgaacgctggcggcaggcttaacacatgcaagtcgagcggtagcacaggggagcttgctccctgggtgacgagcggcggacgggtgagtaatgtctgggaaactgcctgatggagggggataactactggaaacggtagctaataccgcataacgtcgcaagaccaaagagggggaccttcgggcctcttgccatcagatgtgcccagatgggattagctagtaggtggggtaatggctcacctaggcgacgatccctagctggtctgagaggatgaccagccacactggaactgagacacggtccagactcctacgggaggcagcagtggggaatattgcacaatgggcgcaagcctgatgcagccatgccgcgtgtgtgaagaaggccttcgggttgtaaagcactttcagcgaggaggaaggtggtgagcttaatacgctcatcaattgacgttactcgcagaagaagcaccggctaactccgtgccagcagccgcggtaatacggagggtgcaagcgttaatcggaattactgggcgtaaagcgcacgcaggcggtttgttaagtcagatgtgaaatccccgggctcaacctgggaactgcatttgaaactggcaagctagagtctcgtagaggggggtagaattccaggtgtagcggtgaaatgcgtagagatctggaggaataccggtggcgaaggcggccccctggacgaagactgacgctcaggtgcgaaagcgtggggagcaaacaggattagataccctggtagtccacgctgtaaacgatgtcgatttggaggttgtgcccttgaggcgtggcttccggagctaacgcgttaaatcgaccgcctggggagtacggccgcaaggttaaaactcaaatgaattgacgggggcccgcacaagcggtggagcatgtggtttaattcgatgcaacgcgaagaaccttacctactcttgacatccagagaacttagcagagatgctttggtgccttcgggaactctgagacaggtgctgcatggctgtcgtcagctcgtgttgtgaaatgttgggttaagtcccgcaacgagcgcaacccttatcctttgttgccagcggttcggccgggaactcaaaggagactgccagtgataaactggaggaaggtggggatgacgtcaagtcatcatggcccttacgagtagggctacacacgtgctacaatggcatatacaaagagaagcgacctcgcgagagcaagcggacctcataaagtatgtcgtagtccggattggagtctgcaactcgactccatgaagtcggaatcgctagtaatcgtagatcagaatgctacggtgaatacgttcccgggccttgtacacaccgcccgtcacaccatgggagtgggttgcaaaagaagtaggtagcttaaccttcgggagggcgcttaccactttgtgattcatgactggggtgaagtcgtaacaaggtaaccgtaggggaacctgcggttggatcatgtggttaccttaaagaagcgtactttgtagtgctcacacagattgtctgatagaaagtgaaaagcaaggcgtttacgcgttgggagtgaggctgaagagaataaggccgttcgctttctattaatgaaagctcaccctacacgaaaatatcacgcaacgcgtgataagcaattttcgtgtccccttcgtctagaggcccaggacaccgccctttcacggcggtaacaggggttcgaatcccctaggggacgccacttgctggtttgtgagtgaaagtcgccgaccttaatatctcaaaactcatcttcgggtgatgtttgagatatttgctctttaaaaatctggatcaagctgaaaattgaaacactgaacaacgagagttgttcgtgagtctctcaaattttcgcaacacgatgatgaatcgaaagaaacatcttcgggttgtgaggttaagtgactaagcgtacacggtggatgcctaggcagtcagaggcgatgaagggcgtgctaatctgcgaaaagcgtcggtaaggtgatatgaaccgttataaccggcgatacccgaatggggaaacccagtgtgtttcgacacactatcatgtcatgaatacatagtggcatgaggcgaaccgggggaactgaaacatctaagtaccccgaggaaaagaaatcaaccgagattcccccagtagcggcgagcgaacggggaggagcccagaacctgaatcggcttgtgtgttagtggaagcgtctggaaagtcgcgcagcaaagggtgatagccccgtacactaaaatgcacaggtcgtgagttcgatgagtagggcgggacacgtgacatcctgtctgaatatggggggaccatcctccaaggctaaatactcctgactgaccgatagtgaaccagtaccgtgagggaaaggcgaaaagaaccccggcgaggggagtgaaatagaacctgaaaccgtgtacgtacaagcagtgggagcaccttcgtggtgtgactgcgtaccttttgtataatgggtcagcgacttatattttgtagcaaggttaaccgtataggggagccgtagggaaaccgagtcttaactgggcgaatagttgcaaggtatagacccgaaacccggtgatctagccatgggcaggttgaaggttgggtaacactaactggaggaccgaaccgactaatgttgaaaaattagcggatgacttgtggctgggggtgaaaggccaatcaaaccgggagatagctggttctccccgaaagctatttaggtagcgcctcgtgaactcatcttcgggggtagagcactgtttcggctagggggccatcccggcttaccaaaccgatgcaaactccgaataccgaagaatgttatcacgggagacacacggcgggtgctaacgtccgtcgtgaagagggaaacaacccagaccgccagctaaggtcccaaagtcatggttaagtgggaaacgatgtgggaaggcatagacagccaggatgttggcttagaagcagccatcatttaaagaaagcgtaatagctcactggtcgagtcggcctgcgcggaagatgtaacggggctaaaccatgcaccgaagctgcggcagcgacgcttaggcgttgttgggtaggggagcgttctgtaagccgttgaaggtggcctgtgagggttgctggaggtatcagaagtgcgaatgctgacataagtaacgataaagcgggtgaaaagcccgctcgccggaagaccaagggttcctgtccaacgttaatcggggcagggtgagtcgacccctaaggcgaggctgaaaagcgtagtcgatgggaaacaggttaatattcctgtacttggtgttactgcgaaggggggacggagaaggctaggctagccgggcgacggttgtcccggtttaagcgtgtagggggtgtgacctggtaaatccggttgcatattaaccctgaggcgtgatgacgatgcactacggtgcagaagtagttgatgccctgcttccaggaaaatcctctaagcatcaggtaacattaaatcgtaccccaaaccgacacaggtggtcaggtagagaataccaaggcgcttgagagaactcgggtgaaggaactaggcaaaatggtgccgtaacttcgggagaaggcacgctggcatgtaggtgaagtccctcgcggatggagctgaagccagtcgaagataccagctggctgcaactgtttaataaaaacacagcactgtgcaaacacgaaagtggacgtatacggtgtgacgcctgcccggtgctggaaggttaattgatggggtcagccgcaaggcgaagctcttgatcgaagccccagtaaacggcggccgtaactataacggtcctaaggtagcgaaattccttgtcgggtaagttccgacctgcacgaatggcgtaatgatggccaggctgtctccacccgagactcagtgaaattgaactcgctgtgaagatgcagtgtacccgcggcaagacggaaagaccccgtgaacctttactatagcttgacactgaacattgagccttgatgtgtaggataggtgggaggctttgaagcgtggacgccagtctgcgtggagccatccttgaaataccaccctttaatgtttgatgttctaactcggccccgtaatccggggtgaggacagtgtctggtgggtagtttgactggggcggtctcctcccaaagagtaacggaggagcacgaaggttagctaatcacggtcggacatcgtgaggttagtgcaaaggcataagctagcttgactgcgagagtgacggctcgagcaggtacgaaagtaggtcttagtgatccggtggttctgaatggaagggccatcgctcaacggataaaaggtactccggggataacaggctgataccgcccaagagttcatatcgacggcggtgtttggcacctcgatgtcggctcatcacatcctggggctgaagtaggtcccaagggtatggctgttcgccatttaaagtggtacgcgagctgggtttagaacgtcgtgagacagttcggtccctatctgccgtgggcgttggaagattgagaggggttgctcctagtacgagaggaccggagtgaacgcaccactggtgttcgggttgtcatgccaatggcattgcccggtagctaagtgcggaaaagataagcgctgaaagcatctaagcgcgaaacttgcctcaagatgagtcttccctgggcctttaaggtccctgaaggaacgtttaagactaagacgttgataggctgggtgtgtaagtgcagcgatgcattgagctaaccagtactaatgatccgtgaggcttaaccttacaacgccgaagctgttttggcggatgagagaagattttcagcctgatacagattaaatcagaacgcagaagcggtctgataaaacagaattgcctggcggcaatagcgcggtggtcccacctgaccccatgccgaactcagaagtgaaacgccgtagcgccgatggtagtgtggggtctccccatgcgagagtaggacactgccaggcatcaaataaaacgaaaggctcagtcgaaagactgggcctttcgttttatctgttgtttgtcggtgaacgctctcctgagtaggacaaatccgccgggagcggatttgaacgttgcgaagcaacggcccggagggtggcgggcaggacgcccgccataaactgccaggcatcaaattaagcagaaggccatcctgacggatggcctttttgcgtttctacaaactcttcctgtcgtcatatctacaagccggcgcgccgggaaatgtgcgcggaacccctatttgtttatttttctaaatacattcaaatatgtatccgctcatgagacaataaccctgataaatgcttcaataatattgaaaaaggaagagtatgagtattcaacatttccgtgtcgcccttattcccttttttgcggcattttgccttcctgtttttgctcacccagaaacgctggtgaaagtaaaagatgctgaagatcagttgggtgcacgagtgggttacatcgaactggatctcaacagcggtaagatccttgagagttttcgccccgaagaacgttttccaatgatgagcacttttaaagttctgctatgtggcgcggtattatcccgtgttgacgccgggcaagagcaactcggtcgccgcatacactattctcagaatgacttggttgagtactcaccagtcacagaaaagcatcttacggatggcatgacagtaagagaattatgcagtgctgcaataaccatgagtgataacactgcggccaacttacttctgacaacgatcggaggaccgaaggagctaaccgcttttttgcacaacatgggggatcatgtaactcgccttgatcgttgggaaccggagctgaatgaagccataccaaacgacgagcgtgacaccacgatgcctgcagcaatggcaacaacgttgcgcaaactattaactggcgaactacttactctagcttcccggcaacaattaatagactggatggaggcggataaagttgcaggaccacttctgcgctcggcccttccggctagctggtttattgctgataaatctggagccggtgagcgtgggtctcgcggtatcattgcagcactggggccagatggtaagccctcccgtatcgtagttatctacacgacggggagtcaggcaactatggatgaacgaaatagacagatcgctgagataggtgcctcactgattaagcattggtaactgcagaccaagtttactcatatatactttagattgatttaaaacttcatttttaatttaaaaggatctaggtgaagatcctttttgataatctcatgaccaaaatcccttaacgtgagttttcgttccactgagcgtcagaccccgtagaaaagatcaaaggatcttcttgagatcctttttttctgcgcgtaatctgctgcttgcaaacaaaaaaaccaccgctaccagcggtggtttgtttgccggatcaagagctaccaactctttttccgaaggtaactggcttcagcagagcgcagataccaaatactgtccttctagtgtagccgtagttaggccaccacttcaagaactctgtagcaccgcctacatacctcgctctgctaatcctgttaccagtggctgctgccagtggcgataagtcgtgtcttaccgggttggactcaagacgatagttaccggataaggcgcagcggtcgggctgaacggggggttcgtgcacacagcccagcttggagcgaacgacctacaccgaactgagatacctacagcgtgagctatgagaaagcgccacgcttcccgaagggagaaaggcggacaggtatccggtaagcggcagggtcggaacaggagagcgcacgagggagcttccagggggaaacgcctggtatctttatagtcctgtcgggtttcgccacctctgacttgagcgtcgatttttgtgatgctcgtcaggggggcggagcctatggaaaaacgccagcaacgcggcctttttacggttcctggccttttgctgg

SEQ ID NO: 19 - DNA, 7380 bp, Artificial
  Synthetic
agacttagggaccctgcggccgccattaattcctaatttttgttgacactctatcattgatagagttattttaccactccctatcagtgatagagaaaagtgaaatgaatagaccggccgctgagaaaaagcgaagcggcactgctctttaacaatttatcagacaatctgtgtgggcactcgaagatacggattcttaacgtcgcaagacgaaaaatgaataccaagtctcaagagtgaacacgtaattcattacgaagtttaattctttgagcgtcaaactttttaattgaagagtttgatcatggctcagattgaacgctggcggcaggcctaacacatgcaagtcgaacggtaacatttctagcttgctagaagatgacgagtggcggacgggtgagtaatgcttgggaacttgcctttgcgagggggataacagttggaaacgactgctaataccgcataatgtcttcggaccaaacggggcttaggctccggcgcaaagagaggcccaagtgagattagctagttggtaaggtaacggcttaccaaggcgacgatctctagctgttctgagaggaagatcagccacactgggactgagacacggcccagactcctacgggaggcagcagtggggaatattgcacaatgggggaaaccctgatgcagccatgccgcgtgtgtgaagaaggccttcgggttgtaaagcactttcagttgtgaggaaaagttagtagttaatacctgctagccgtgacgttaacaacagaagaagcaccggctaactccgtgccagcagccgcggtaatacggagggtgcgagcgttaatcggaattactgggcgtaaagcgcacgcaggcggtttgttaagctagatgtgaaagccccgggctcaacctgggatggtcatttagaactggcagactagagtcttggagaggggagtggaattccaggtgtagcggtgaaatgcgtagatatctggaggaacatcagtggcgaaggcgactccctggccaaagactgacgctcatgtgcgaaagtgtgggtagcgaacaggattagataccctggtagtccacaccgtaaacgctgtctactagctgtgtgtgtctttaagacgtgcgtagcgaagctaacgcgctaagtagaccgcctggggagtacggccgcaaggttaaaactcaaatgaattgacgggggcccgcacaagcggtggagcatgtggtttaattcgatgcaacgcgaagaaccttacctacacttgacatgctgagaagttactagagatagtttcgtgccttcgggaactcagacacaggtgctgcatggctgtcgtcagctcgtgtcgtgagatgttgggttaagtcccgcaacgagcgcaacccttgtccttagttgccagccttaagttgggcactctaaggagactgccggtgacaaaccggaggaaggtggggacgacgtcaagtcatcatggcccttacgtgtagggctacacacgtgctacaatggcatttacagagggaagcgagacagtgatgtggagcggaccccttaaagaatgtcgtagtccggattggagtctgcaactcgactccatgaagtcggaatcgctagtaatcgcaggtcagaatactgcggtgaatacgttcccgggccttgtacacaccgcccgtcacaccatgggagtgggatgcaaaagaagtagttagtctaaccttcgggaggacgattaccactttgtgtttcatgactggggtgaagtcgtaacaaggtaaccctaggggaacctggggttggatcatgtggttaccttaaagaagcgtactttgtagtgctcacacagattgtctgatagaaagtgaaaagcaaggcgtttacgcgttgggagtgaggctgaagagaataaggccgttcgctttctattaatgaaagctcaccctacacgaaaatatcacgcaacgcgtgataagcaattttcgtgtccccttcgtctagaggcccaggacaccgccctttcacggcggtaacaggggttcgaatcccctaggggacgccacttgctggtttgtgagtgaaagtcgccgaccttaatatctcaaaactcatcttcgggtgatgtttgagatatttgctctttaaaaatctggatcaagctgaaaattgaaacactgaacaacgagagttgttcgtgagtctctcaaattttcgcaacacgatgatgaatcgaaagaaacatcttcgggttgtgaggttaagtgacaaagcgtatacggtggatgccttggcagttagaggcgatgaaggacgtgtaagtctgcgaaaagctgtggtgagccgacaaaatgcatttgagccacagatgtccgaatggggaaacccacctatttataggtatcgttaactgaatacataggttaacgaggcaaacgaggggaactgaaacatctaagtacccttaggaaaagaaatcaaccgagattcccctagtagcggcgagcgaacggggagcagcccttaagctgtttagaatttagtggaatcctttgggaagaggagcgatacaaggtgatagccctgtacacgacggattctttacagtgaaatcgagtaggtcgggacacgtgttatcttgactgaatatggggggaccatcctccaaggctaaatactcctaactgaccgatagtgaaccagtaccgtgagggaaaggcgaaaagaacccctgtgaggggagtgaaatagaacctgaaaccgtatacgtacaagcagtgggagcccttcggggtgactgcgtaccttttgtataatgggtcagcgacttatatttagtagcaaggttaagtgaataacggagccgtagcgaaagcgagtgttaactgcgcgtttagttgctaggtatagacccgaaacccggtgatctagccatgagcaggttgaaggttgagtaacatcaactggaggaccgaacccactaacgttgaaaagttaggggatgacttgtggctgggggtgaaaggccaatcaaaccgggagatagctggttctccccgaaatctatttaggtagagcctcggacgaattccattgggggtagagcactgttaaggctagggggtcatcccgacttaccaaccctttgcaaactccgaataccaatgagaactatccgggagacacacggcgggtgctaacgtccgtcgtggagagggaaacaacccagaccgccagctaaggtcccaaaatattgctaagtgggaaacgatgtgggaaggcatagacagctaggaggttggcttagaagcagccaccctctaaagaaagcgtaatagctcactagtcgagtcggcctgcgcggaagatgtaacggggctaagcaatataccgaagctgcggcagcatgtttacatgctgggtaggggagcgttgtgtaagtggatgaaggtgagttgtaaagcttgctggacatatcacaagtgcgaatgctgacatgagtaacgataatgggagtgaaaaactcccacgccggaagaccaaggtttcctgtcccatgctaatcagggcagggtaagtcggcccctaaggcgaggcagaaatgcgtagtcgatgggaaacgggttaatattcccgtacttatataatcagtgatggagggacggagaaggctaggcaagcttggcgttggttgtccaagtgaaagtgagtaggctgaagacttaggtaaatccgggttttcaaggccgagacacgagacgagctcccaagggagtgaagttgttgatgccctgcttccaggaaaagcttctaaacttatgattatatgaaccgtaccccaaaccgacacaggtggtcaggtagagaatactaaggcgcttgagagaactcgggtgaaggaactcggcaaaattgtaccgtaacttcgggagaaggtacgcctctgtttgtgaacacttcgcgtggtaagcaaatggaggccgcagtgaccaggtggctgggactgtttattaaaaacacagcactctgcaaactcgtaagaggacgtatagggtgtgacacctgcccggtgccggaaggttaattgatggggttagttttcggacgaagctcttgatcgaagccccggtaaacggcggccgtaactataacggtcctaaggtagcgaaattccttgtcgggtaagttccgacctgcacgaatggtgtaaccatggccacgctgtctccacccgagactcagtgaaattgaaatcgcagtgaagatgctgtgtacccgcacctagacggaaagaccccgtgaacctttactacagcttggcactgaacattgaacctacatgtgtaggataggtgggaggctttgaagcacagtcgctagattgtgtggagccgtccttgaaataccacccttgtatgtttgatgttctaacattgttcccttatcgggaatgtggacagtgtctggtgggtagtttgactggggcggtctcctcccaaatagtaacggaggagcacgaaggttagctaatcacggtcggacatcgtgaggttagtgcaatggcataagctagcttaactgcgagacagacacgtcgagcaggtacgaaagtaggtcatagtgatccggtggttctgtatggaagggccatcgctcaacggataaaaggtactccggggataacaggctgataccgcccaagagttcatatcgacggcggtgtttggcacctcgatgtcggctcatcacatcctggggctgaagtcggtcccaagggtatggctgttcgccatttaaagtggtacgcgagctgggtttagaacgtcgtgagacagttcggtccctatctggtgtgggcgttggatgattgatgggagctgctcctagtacgagaggaccggagtggacgaaccgctggtgttcgggttgtcatgccaatggcattgcccggtagctatgttcggaacggataaccgctgaaagcatctaagcgggaagccggcccaaagatgagtcatccctgacctttaaggtctggaagggttgttatagacgatgacgttgataggcagggtgtggaagcgttgtaaggcgttaagctaacctgtactaattgcccgagaggcttaaccatacaacgccgaagctgttttggcggatgagagaagattttcagcctgatacagattaaatcagaacgcagaagcggtctgataaaacagaatttcctggcagccatagcgatacggtaccacctgactccattccgaactcagaagtgaaacgtattagcgccgatggtagtgtggggcttccccatgtgagagtaggacactgccaggtcccaaataaaacgaaaggctcagtcgaaagactgggcctttcgttttatctgttgtttgtcggtgaacgctctcctgagtaggacaaatccgccgggagcggatttgaacgttgcgaagcaacggcccggagggtggcgggcaggacgcccgccataaactgccaggcatcaaattaagcagaaggccatcctgacggatggcctttttgcgtttctacaaactcttcctgtcgtcatatctacaagccggcgcgccgggaaatgtgcgcggaacccctatttgtttatttttctaaatacattcaaatatgtatccgctcatgagacaataaccctgataaatgcttcaataatattgaaaaaggaagagtatgagtattcaacatttccgtgtcgcccttattcccttttttgcggcattttgccttcctgtttttgctcacccagaaacgctggtgaaagtaaaagatgctgaagatcagttgggtgcacgagtgggttacatcgaactggatctcaacagcggtaagatccttgagagttttcgccccgaagaacgttttccaatgatgagcacttttaaagttctgctatgtggcgcggtattatcccgtgttgacgccgggcaagagcaactcggtcgccgcatacactattctcagaatgacttggttgagtactcaccagtcacagaaaagcatcttacggatggcatgacagtaagagaattatgcagtgctgcaataaccatgagtgataacactgcggccaacttacttctgacaacgatcggaggaccgaaggagctaaccgcttttttgcacaacatgggggatcatgtaactcgccttgatcgttgggaaccggagctgaatgaagccataccaaacgacgagcgtgacaccacgatgcctgcagcaatggcaacaacgttgcgcaaactattaactggcgaactacttactctagcttcccggcaacaattaatagactggatggaggcggataaagttgcaggaccacttctgcgctcggcccttccggctagctggtttattgctgataaatctggagccggtgagcgtgggtctcgcggtatcattgcagcactggggccagatggtaagccctcccgtatcgtagttatctacacgacggggagtcaggcaactatggatgaacgaaatagacagatcgctgagataggtgcctcactgattaagcattggtaactgcagaccaagtttactcatatatactttagattgatttaaaacttcatttttaatttaaaaggatctaggtgaagatcctttttgataatctcatgaccaaaatcccttaacgtgagttttcgttccactgagcgtcagaccccgtagaaaagatcaaaggatcttcttgagatcctttttttctgcgcgtaatctgctgcttgcaaacaaaaaaaccaccgctaccagcggtggtttgtttgccggatcaagagctaccaactctttttccgaaggtaactggcttcagcagagcgcagataccaaatactgtccttctagtgtagccgtagttaggccaccacttcaagaactctgtagcaccgcctacatacctcgctctgctaatcctgttaccagtggctgctgccagtggcgataagtcgtgtcttaccgggttggactcaagacgatagttaccggataaggcgcagcggtcgggctgaacggggggttcgtgcacacagcccagcttggagcgaacgacctacaccgaactgagatacctacagcgtgagctatgagaaagcgccacgcttcccgaagggagaaaggcggacaggtatccggtaagcggcagggtcggaacaggagagcgcacgagggagcttccagggggaaacgcctggtatctttatagtcctgtcgggtttcgccacctctgacttgagcgtcgatttttgtgatgctcgtcaggggggcggagcctatggaaaaacgccagcaacgcggcctttttacggttcctggccttttgctgg

SEQ ID NO: 20 - DNA, 7383 bp, Artificial
  Synthetic
agacttagggaccctgcggccgccattaattcctaatttttgttgacactctatcattgatagagttattttaccactccctatcagtgatagagaaaagtgaaatgaatagaccggccgctgagaaaaagcgaagcggcactgctctttaacaatttatcagacaatctgtgtgggcactcgaagatacggattcttaacgtcgcaagacgaaaaatgaataccaagtctcaagagtgaacacgtaattcattacgaagtttaattctttgagcgtcaaacttttgaactgaagagtttgatcctggctcagattgaacgctggcggcatgccttacacatgcaagtcgaacggcagcacgggtgcttgcacctggtggcgagtggcgaacgggtgagtaatacatcggaacatgtcctgtagtgggggatagcccggcgaaagccggattaataccgcatacgatccatggatgaaagcgggggaccttcgggcctcgcgctatagggttggccgatggctgattagctagttggtggggtaaaggcctaccaaggcgacgatcagtagctggtctgagaggacgaccagccacactgggactgagacacggcccagactcctacgggaggcagcagtggggaattttggacaatgggcgaaagcctgatccagcaatgccgcgtgtgtgaagaaggccttcgggttgtaaagcacttttgtccggaaagaaatccttggctctaatacagtcgggggatgacggtaccggaagaataagcaccggctaactacgtgccagcagccgcggtaatacgtagggtgcgagcgttaatcggaattactgggcgtaaagcgtgcgcaggcggtttgctaagaccgatgtgaaatccccgggctcaacctgggaactgcattggtgactggcaggctagagtatggcagaggggggtagaattccacgtgtagcagtgaaatgcgtagagatgtggaggaataccgatggcgaaggcagccccctgggccaatactgacgctcatgcacgaaagcgtggggagcaaacaggattagataccctggtagtccacgccctaaacgatgtcaactagttgttggggattcatttccttagtaacgtagctaacgcgtgaagttgaccgcctggggagtacggtcgcaagattaaaactcaaaggaattgacggggacccgcacaagcggtggatgatgtggattaattcgatgcaacgcgaaaaaccttacctacccttgacatggtcggaatcctgctgagaggtgggagtgctcgaaagagaaccggcgcacaggtgctgcatggctgtcgtcagctcgtgtcgtgagatgttgggttaagtcccgcaacgagcgcaacccttgtccttagttgctacgcaagagcactctaaggagactgccggtgacaaaccggaggaaggtggggatgacgtcaagtcctcatggcccttatgggtagggcttcacacgtcatacaatggtcggaacagagggttgccaacccgcgagggggagctaatcccagaaaaccgatcgtagtccggattgcactctgcaactcgagtgcatgaagctggaatcgctagtaatcgcggatcagcatgccgcggtgaatacgttcccgggtcttgtacacaccgcccgtcacaccatgggagtgggttttaccagaagtggctagtctaaccgcaaggaggacggtcaccacggtaggattcatgactggggtgaagtcgtaacaaggtagccgtatcggaaggtgcggctggatcatgtggtttccttaaagaagcgtactttgtagtgctcacacagattgtctgatagaaagtgaaaagcaaggcgtttacgcgttgggagtgaggctgaagagaataaggccgttcgctttctattaatgaaagctcaccctacacgaaaatatcacgcaacgcgtgataagcaattttcgtgtccccttcgtctagaggcccaggacaccgccctttcacggcggtaacaggggttcgaatcccctaggggacgccacttgctggtttgtgagtgaaagtcgccgaccttaatatctcaaaactcatcttcgggtgatgtttgagatatttgctctttaaaaatctggatcaagctgaaaattgaaacactgaacaacgagagttgttcgtgagtctctcaaattttcgcaacacgatgatgaatcgaaagaaacatcttcgggttgtgaggtcaagcgaacaagtgcatgtggtggatgccttggcgatcacaggcgatgaaggacgcggtagcctgcgaaaagctacggggagctggcaaacgagctttgatccgtagatgtccgaatggggaaacccactccttttggagtatccatggctgaatacataggccatgcgaagcgaacgcggtgaactgaaacatctaagtaaccgcaggaaaagaaatcaaccgagattcccaaagtagtggcgagcgaaatgggatgagccttgcactctttatttgtattgttagccgaacgctctggaaagtgcggccatagcaggtgatagccctgtaggcgaaaacagtatgaaagaactaggtgtgcgacaagtagggcgggacacgtgaaatcctgtctgaagatggggggaccatcctccaaggctaaatactcgtgatcgaccgatagtgaaccagtaccgtgagggaaaggcgaaaagaaccccgggaggggagtgaaatagatcctgaaaccgcatgcatacaaacagtcggagcctcgtaaggggtgacggcgtaccttttgtataatgggtcagcgacttacgttcagtagcaagcttaaccgtatagggcaggcgtagcgaaagcgagtccgaatagggcgttcagttgctgggcgtagacccgaaaccaggtgatctatccatggccaggatgaaggtgcggtaacacgtactggaggtccgaacccactaacgttgaaaagttaggggatgagctgtggataggggtgaaaggctaaacaaacctggaaatagctggttctctccgaaaactatttaggtagtgcctcgtgtctcaccttcgggggtagagcactgtcatggttggggggtctattgcagattaccccgccatagcaaactccgaataccgaagagtgcaatcacgggagacagacatcgggtgctaacgtccggtgtcaagagggaaacaacccagaccgccagctaaggtccccaaatatagctaagtgggaaacgaagtgggaaggctaaaacagtcaggaggttggcttagaagcagccaccctttaaagaaagcgtaatagctcactgatcgagtcgtcctgcgcggaagatgtaacggggctaagctatataccgaagctgcggatgcgagcttgctcgcatggtaggagagcgttccgtaagcctgcgaaggtgccttgtaaagggtgctggaggtatcggaagtgcgaatgctgacatgagtagcgataaagggggtgaaaggccccctcgccgtaagcccaaggtttcctacgcaacgttcatcggcgtagggtgagtcggcccctaaggcgaggcagaaatgcgtagctgatgggaagcaggtcaatattcctgcaccattgttagatgcgatggggggacggatcgcggaaggttgtccgggtgttggaagtcccggtcgctgcattggagaaggcgcttaggcaaatccgggcgcgtaattcaagggtgtggcgcgagctccttagggagcgaagcaattggaagtggttccaagaaaagcctctaagcttcagtctaacgatgaccgtaccgcaaaccgacacaggtgggcgagatgagtattctaaggcgcttgagagaactcgggagaaggaactcggcaaattggtaccgtaacttcgggataaggtacgcccttgtagcttgactggcctgcgccaggagggtgaaggggttgcaataaactggtggctgcgactgtttaataaaaacacagcactctgcaaacacgaaagtggacgtatagggtgtgacgcctgcccggtgccggaagattaaatgatggggtgcaagctcttgattgaagtcccggtaaacggcggccgtaactataacggtcctaaggtagcgaaattccttgtcgggtaagttccgacctgcacgaatggcgtaacgatggccacactgtctcctcccgagactcagcgaagttgaagtgtttgtgatgatgcaatctacccgcggctagacggaaagaccccatgaacctttactgtagctttgcattggactttgaaccgatctgtgtaggataggtgggaggctatgaagccggaacgctagtttcggtggagccgtccttgaaataccaccctggtttgtttgaggttctaaccttggcccgtgatccgggtcggggacagtgcatggtaggcagtttgactggggcggtctcctcccaaagcgtaacggaggagtacgaaggtacgctaggtacggtcggaaatcgtgctgatagtgcaatggcataagcgtgcttaactgcgagaccgacaagtcgagcaggtgcgaaagcaggtcatagtgatccggtggttctgtatggaagggccatcgctcaacggataaaaggtactctggggataacaggctgataccgcccaagagttcatatcgacggcggtgtttggcacctcgatgtcggctcatctcatcctggggctgtagccggtcccaagggtatggctgttcgccatttaaagaggtacgtgagctgggtttaaaacgtcgtgagacagtttggtccctatctgccgtgggcgttggatatttgaagggggctgctcctagtacgagaggaccggagtggacgaacctctggtgtaccggttgtcacgccagtggcatcgccgggtagctatgttcggaagagataaccgctgaaagcatctaagcgggaaactcgccttaagatgagatatccctggggactagatccccttgaagggtcgttcgagaccaggacgttgataggtcaggtgtgtaagcgcagtaatgcgttcagctaactgatactaattgcccgtaaggcttgatcctacaacgccgaagctgttttggcggatgagagaagattttcagcctgatacagattaaatcagaacgcagaagcggtctgataaaacagaatttgcctgatgaccatagcgagtcggtcccaccccttcccatcccgaacaggaccgtgaaacgactctacgccgatgatagtgcggattcccgtgtgaaagtaggtaatcgtcaggctccaaataaaacgaaaggctcagtcgaaagactgggcctttcgttttatctgttgtttgtcggtgaacgctctcctgagtaggacaaatccgccgggagcggatttgaacgttgcgaagcaacggcccggagggtggcgggcaggacgcccgccataaactgccaggcatcaaattaagcagaaggccatcctgacggatggcctttttgcgtttctacaaactcttcctgtcgtcatatctacaagccggcgcgccgggaaatgtgcgcggaacccctatttgtttatttttctaaatacattcaaatatgtatccgctcatgagacaataaccctgataaatgcttcaataatattgaaaaaggaagagtatgagtattcaacatttccgtgtcgcccttattcccttttttgcggcattttgccttcctgtttttgctcacccagaaacgctggtgaaagtaaaagatgctgaagatcagttgggtgcacgagtgggttacatcgaactggatctcaacagcggtaagatccttgagagttttcgccccgaagaacgttttccaatgatgagcacttttaaagttctgctatgtggcgcggtattatcccgtgttgacgccgggcaagagcaactcggtcgccgcatacactattctcagaatgacttggttgagtactcaccagtcacagaaaagcatcttacggatggcatgacagtaagagaattatgcagtgctgcaataaccatgagtgataacactgcggccaacttacttctgacaacgatcggaggaccgaaggagctaaccgcttttttgcacaacatgggggatcatgtaactcgccttgatcgttgggaaccggagctgaatgaagccataccaaacgacgagcgtgacaccacgatgcctgcagcaatggcaacaacgttgcgcaaactattaactggcgaactacttactctagcttcccggcaacaattaatagactggatggaggcggataaagttgcaggaccacttctgcgctcggcccttccggctagctggtttattgctgataaatctggagccggtgagcgtgggtctcgcggtatcattgcagcactggggccagatggtaagccctcccgtatcgtagttatctacacgacggggagtcaggcaactatggatgaacgaaatagacagatcgctgagataggtgcctcactgattaagcattggtaactgcagaccaagtttactcatatatactttagattgatttaaaacttcatttttaatttaaaaggatctaggtgaagatcctttttgataatctcatgaccaaaatcccttaacgtgagttttcgttccactgagcgtcagaccccgtagaaaagatcaaaggatcttcttgagatcctttttttctgcgcgtaatctgctgcttgcaaacaaaaaaaccaccgctaccagcggtggtttgtttgccggatcaagagctaccaactctttttccgaaggtaactggcttcagcagagcgcagataccaaatactgtccttctagtgtagccgtagttaggccaccacttcaagaactctgtagcaccgcctacatacctcgctctgctaatcctgttaccagtggctgctgccagtggcgataagtcgtgtcttaccgggttggactcaagacgatagttaccggataaggcgcagcggtcgggctgaacggggggttcgtgcacacagcccagcttggagcgaacgacctacaccgaactgagatacctacagcgtgagctatgagaaagcgccacgcttcccgaagggagaaaggcggacaggtatccggtaagcggcagggtcggaacaggagagcgcacgagggagcttccagggggaaacgcctggtatctttatagtcctgtcgggtttcgccacctctgacttgagcgtcgatttttgtgatgctcgtcaggggggcggagcctatggaaaaacgccagcaacgcggcctttttacggttcctggccttttgctgg

SEQ ID NO: 21 - DNA, 7528 bp, Artificial
  Synthetic
agacttagggaccctgcggccgccattaattcctaatttttgttgacactctatcattgatagagttattttaccactccctatcagtgatagagaaaagtgaaatgaatagaccggccgctgagaaaaagcgaagcggcactgctctttaacaatttatcagacaatctgtgtgggcactcgaagatacggattcttaacgtcgcaagacgaaaaatgaataccaagtctcaagagtgaacacgtaattcattacgaagtttaattctttgagcgtcaaactttttaattgaagagtttgatcatggctcagattgaacgctggcggcaggcctaacacatgcaagtcgagcggtaacaggagaaagcttgctttcttgctgacgagcggcggacgggtgagtaatgtatggggatctgcccgatagagggggataactactggaaacggtggctaataccgcataatgtctacggaccaaagcaggggctcttcggaccttgcactatcggatgaacccatatgggattagctagtaggtggggtaaaggctcacctaggcgacgatctctagctggtctgagaggatgatcagccacactgggactgagacacggcccagactcctacgggaggcagcagtggggaatattgcacaatgggcgcaagcctgatgcagccatgccgcgtgtatgaagaaggccttagggttgtaaagtactttcagcggggaggaaggtgataaggttaatacccttattaattgacgttacccgcagaagaagcaccggctaactccgtgccagcagccgcggtaatacggagggtgcaagcgttaatcggaattactgggcgtaaagcgcacgcaggcggtcaattaagtcagatgtgaaagccccgagcttaacttgggaattgcatctgaaactggttggctagagtcttgtagaggggggtagaattccatgtgtagcggtgaaatgcgtagagatgtggaggaataccggtggcgaaggcggccccctggacaaagactgacgctcaggtgcgaaagcgtggggagcaaacaggattagataccctggtagtccacgctgtaaacgatgtcgatttagaggttgtggtcttgaaccgtggcttctggagctaacgcgttaaatcgaccgcctggggagtacggccgcaaggttaaaactcaaatgaattgacgggggcccgcacaagcggtggagcatgtggtttaattcgatgcaacgcgaagaaccttacctactcttgacatccagcgaatcctttagagatagaggagtgccttcgggaacgctgagacaggtgctgcatggctgtcgtcagctcgtgttgtgaaatgttgggttaagtcccgcaacgagcgcaacccttatcctttgttgccagcacgtaatggtgggaactcaaaggagactgccggtgataaaccggaggaaggtggggatgacgtcaagtcatcatggcccttacgagtagggctacacacgtgctacaatggcagatacaaagagaagcgacctcgcgagagcaagcggaactcataaagtctgtcgtagtccggattggagtctgcaactcgactccatgaagtcggaatcgctagtaatcgtagatcagaatgctacggtgaatacgttcccgggccttgtacacaccgcccgtcacaccatgggagtgggttgcaaaagaagtaggtagcttaaccttcgggagggcgcttaccactttgtgattcatgactggggtgaagtcgtaacaaggtaaccgtaggggaacctgcggttggatcatgtggttaccttaaagaagcgtactttgtagtgctcacacagattgtctgatagaaagtgaaaagcaaggcgtttacgcgttgggagtgaggctgaagagaataaggccgttcgctttctattaatgaaagctcaccctacacgaaaatatcacgcaacgcgtgataagcaattttcgtgtccccttcgtctagaggcccaggacaccgccctttcacggcggtaacaggggttcgaatcccctaggggacgccacttgctggtttgtgagtgaaagtcgccgaccttaatatctcaaaactcatcttcgggtgatgtttgagatatttgctctttaaaaatctggatcaagctgaaaattgaaacactgaacaacgagagttgttcgtgagtctctcaaattttcgcaacacgatgatgaatcgaaagaaacatcttcgggttgtgaggttaagcgactaagcgtacacggtggatgcctaggcaatcagaggcgatgaaggacgtgctaatctgcgaaaagcgtcggtaaggtgatatgaaccgttataaccgacgatgtccgaatggggaaacccagtgcaattcgttgcactatcgtttgatgaatccatagtcaaacgaggcgaaccgggggaactgaaacatctcagtaccccgaggaaaagaaatcaaccgagattcccctagtagcggcgagcgaacggggagcagcccagagtcttaatcagcatcagcatcaggagaacggtctggaaaggccggcaataaagggtgatagccccgtatccgaaggtgttggtgttgtgaactcgatgagtagggcgggacacgtgttatcctgtctgaatatggggggaccatcctccaaggctaaatactcctgattgaccgatagtgaaccagtaccgtgagggaaaggcgaaaagaaccccggcgaggggagtgaaatagaacctgaaaccgtgtacgtacaagcagtgggagccccaccactaagccagtggtgagtcatcacagcgtcatccttacttgatggcggttggcggaacgtcctttgtgacgcccaacccaaaaaaatcaagcaaagggggcttagtggtggggtgactgcgtaccttttgtataatgggtcagcgacttatattctgtagcaaggttaaccgtataggggagccgtagggaaaccgagtcttaactgggcgaatgagttgcagggtatagacccgaaacccggtgatctagccatgggcaggttgaaggttgggtaacactaactggaggaccgaaccgactaatgttgaaaaattagcggatgacttgtggctgggggtgaaaggccaatcaaaccgggagatagctggttctccccgaaagctatttaggtagcgcctcgtgaactcatcttcgggggtagagcactgtttcggctagggggtcatcccgacttaccaacccgatgcaaactacgaataccgaagaatgttatcacgggagacacacggcgggtgctaacgttcgtcgtgaagagggaaacaacccagaccgccagctaaggtcccaaagtcatggttaagtgggaaacgaagtgggaaggctcagacagccaggatgttggcttagaagcagccatcatttaaagaaagcgtaatagctcactggtcgagtcggcctgcgcggaagatgtaacggggctaaaccatgcaccgaagctgcggcagcgacatgtaaatgttgttgggtaggggagcgttctgtaagcctgtgaaggtgtgctgcgaggcatgctggaggtatcagaagtgcgaatgctgacataagtaacgataatgcgggtgaaaaacccgcacgccggaagaccaagggttcctgtccaacgttaatcggggcagggtgagtcgacccctaaggcgaggcagaaatgcgtagtcgatgggaaacaggttaatattcctgtactggtgataattgcgatggggggacggagaaggctaggctggccgggcgacggttgtcccggtttaaggatgtaggtgggcgaattaggcaaatccggttcgctatacactgaggtctgatgacgagtcactacggtggcgaagtagctcatgccccgcttccaggaaaagcctctaagctctagattatcattaatcgtaccccaaaccgacacaggtggtcaggtagagaatactcaggcgcttgagagaactcgggtgaaggaactaggcaaaatggtgccgtaacttcgggagaaggcacgctggcactaggtgaagtggtttacccatggagctgaagccagtcgcagataccagctggctgcaactgtttattaaaaacacagcactgtgcaaacacgaaagtggacgtatacggtgtgacgcctgcccggtgctggaaggttaattgatggggttatccgtaaggagaagctcttgatcgaagccccagtaaacggcggccgtaactataacggtcctaaggtagcgaaattccttgtcgggtaagttccgacctgcacgaatggcgtaatgatggccaggctgtctccacccgagactcagtgaaattgaactcgctgtgaagatgcagtgtacccgcggcaagacggaaagaccccgtgaacctttactatagcttgacactgaacattgagccttgatgtgtaggataggtgggaggctttgaagtgtggacgccagtctgcatggagccaaccttgaaataccaccctttaatgtttgatgttctaacgttgccccgtgatccggggtgcggacagtgtctggtgggtagtttgactggggcggtctcctcccaaagcgtaacggaggagcacgaaggttggctaagcatggtcggacatcatgcggttagtgcaaaggcataagccagcttgactgcgagagtgacggctcgagcaggtacgaaagtaggtcttagtgatccggtggttctgaatggaagggccatcgctcaacggataaaaggtactccggggataacaggctgataccgcccaagagttcatatcgacggcggtgtttggcacctcgatgtcggctcatcacatcctggggctgaagtaggtcccaagggtatggctgttcgccatttaaagtggtacgcgagctgggtttagaacgtcgtgagacagttcggtccctatctgccgtgggcgttggaagattgaaaggggctgctcctagtacgagaggaccggagtggacgcaccgctggtgttcgggttgtcatgccaatggcactgcccggtagctaagtgcggaagagataaccgctgaaagcatctaagcgggaaacttgccttgagatgagtcttccctgactctttaagggtcctaaaggaacgtttaagacgaagacgttgataggctgggtgtgtaagcgtagcgatacgttgagctaaccagtactaatgaaccgtgaggcttaacctgacaacgccgaagctgttttggcggatgagagaagattttcagcctgatacagattaaatcagaacgcagaagcggtctgataaaacagaatttgtctggcggcaatagcgcggtggtcccacctgaccccatgccgaactcagcagtgaaacgccgtagcgccgatggtagtgtggggtctccccatgtgagagtagggaactgccagacatcaaataaaacgaaaggctcagtcgaaagactgggcctttcgttttatctgttgtttgtcggtgaacgctctcctgagtaggacaaatccgccgggagcggatttgaacgttgcgaagcaacggcccggagggtggcgggcaggacgcccgccataaactgccaggcatcaaattaagcagaaggccatcctgacggatggcctttttgcgtttctacaaactcttcctgtcgtcatatctacaagccggcgcgccgggaaatgtgcgcggaacccctatttgtttatttttctaaatacattcaaatatgtatccgctcatgagacaataaccctgataaatgcttcaataatattgaaaaaggaagagtatgagtattcaacatttccgtgtcgcccttattcccttttttgcggcattttgccttcctgtttttgctcacccagaaacgctggtgaaagtaaaagatgctgaagatcagttgggtgcacgagtgggttacatcgaactggatctcaacagcggtaagatccttgagagttttcgccccgaagaacgttttccaatgatgagcacttttaaagttctgctatgtggcgcggtattatcccgtgttgacgccgggcaagagcaactcggtcgccgcatacactattctcagaatgacttggttgagtactcaccagtcacagaaaagcatcttacggatggcatgacagtaagagaattatgcagtgctgcaataaccatgagtgataacactgcggccaacttacttctgacaacgatcggaggaccgaaggagctaaccgcttttttgcacaacatgggggatcatgtaactcgccttgatcgttgggaaccggagctgaatgaagccataccaaacgacgagcgtgacaccacgatgcctgcagcaatggcaacaacgttgcgcaaactattaactggcgaactacttactctagcttcccggcaacaattaatagactggatggaggcggataaagttgcaggaccacttctgcgctcggcccttccggctagctggtttattgctgataaatctggagccggtgagcgtgggtctcgcggtatcattgcagcactggggccagatggtaagccctcccgtatcgtagttatctacacgacggggagtcaggcaactatggatgaacgaaatagacagatcgctgagataggtgcctcactgattaagcattggtaactgcagaccaagtttactcatatatactttagattgatttaaaacttcatttttaatttaaaaggatctaggtgaagatcctttttgataatctcatgaccaaaatcccttaacgtgagttttcgttccactgagcgtcagaccccgtagaaaagatcaaaggatcttcttgagatcctttttttctgcgcgtaatctgctgcttgcaaacaaaaaaaccaccgctaccagcggtggtttgtttgccggatcaagagctaccaactctttttccgaaggtaactggcttcagcagagcgcagataccaaatactgtccttctagtgtagccgtagttaggccaccacttcaagaactctgtagcaccgcctacatacctcgctctgctaatcctgttaccagtggctgctgccagtggcgataagtcgtgtcttaccgggttggactcaagacgatagttaccggataaggcgcagcggtcgggctgaacggggggttcgtgcacacagcccagcttggagcgaacgacctacaccgaactgagatacctacagcgtgagctatgagaaagcgccacgcttcccgaagggagaaaggcggacaggtatccggtaagcggcagggtcggaacaggagagcgcacgagggagcttccagggggaaacgcctggtatctttatagtcctgtcgggtttcgccacctctgacttgagcgtcgatttttgtgatgctcgtcaggggggcggagcctatggaaaaacgccagcaacgcggcctttttacggttcctggccttttgctgg

SEQ ID NO: 22 - DNA, 7424 bp, Artificial
  Synthetic
agacttagggaccctgcggccgccattaattcctaatttttgttgacactctatcattgatagagttattttaccactccctatcagtgatagagaaaagtgaaatgaatagaccggccgctgagaaaaagcgaagcggcgcactgctctttaacaatttatcagacaatctgtgtgggtactcgaagatacggattcttaacgtcgcaagacgataaatgaataccaagtctcaagagtgaacacgtaattcattacgaagtttaattctttgagcatcaaacttttaaattgaagagtttgatcatggctcagattgaacgctggcggcaggcctaacacatgcaagtcgaacggtaacaggaatcagcttgctgattcgctgacgagtggcggacgggtgagtaatgtctgggaaactgcctgatggagggggataactactggaaacggtagctaataccgcataatgtcgcaagaccaaaaagggggaccttcgggcctcttgccatcagatgtgcccagatgggattagcttgttggtggggtaacggctcaccaaggcgacgatccctagctggtctgagaggatgaccagccacactggaactgagacacggtccagactcctacgggaggcagcagtggggaatattgcacaatgggcgcaagcctgatgcagccatgccgcgtgtatgaagaaggccttcgggttgtaaagtactttcagcggggaggaagggagtaaagttaatacctttgctcattgacgttatccgcagaagaagcaccggctaactccgtgccagcagccgcggtaatacggagggtgcaagcgttaatcggaattactgggcgtaaagcgcacgcaggcggtttgttaagtcagatgtgaaatccccgggctcaacctgggaactgcatctgatactggcaagcttgagtctcgtagaggggggtagaattccaggtgtagcggtgaaatgcgtagagatctggaggaataccggtggcgaaggcggccccctggacgaagactgacgctcaggtgcgaaagcgtggggagcaaacaggattagataccctggtagtccacgccgtaaacgatgtcgacttggaggttgtgcccttgaggcgtggcttccggagctaacgcgttaagtcgaccgcctggggagtacggccgcaaggttaaaactcaaatgaattgacgggggcccgcacaagcggtggagcatgtggtttaattcgatgcaacgcgaagaaccttacctggtcttgacatccacggaagttttcagagatgagaatgtgccttcgggaaccgtgagacaggtgctgcatggctgtcgtcagctcgtgttgtgaaatgttgggttaagtcccgcaacgagcgcaacccttatcctttgttgccagcggtccggccgggaactcaaaggagactgccagtgataaactggaggaaggtggggacgacgtcaagtcatcatggcccttacgaccagggctacacacgtgctacaatggcgcatacaaagagaagcgacctcgcgagagcaagcggacctcataaagtgcgtcgtagtccggattggagtctgcaactcgactccatgaagtcggaatcgctagtaatcgtggatcagaatgccacggtgaatacgttcccgggccttgtacacaccgcccgtcacaccatgggagtgggttgcaaaagaagtaggtagcttaaccttcgggagggcgcttaccactttgtgattcatgactggggtgaagtcgtaacaaggtaaccgtaggggaacctgcggttggatcacctccttaccttaaagaagcgtactttgcagtgctcacacagattgtctgatgaaaatgagcagtaaaacctctacaggcttgtagctcaggtggttagagcgcacccctgataagggtgaggtcggtggttcaagtccactcaggcctaccaaatttgcacggcaaatttgaagaggttttaactacatgttatggggctatagctcagctgggagagcgcctgctttgcacgcaggaggtctgcggttcgatcccgcatagctccaccatctctgtagtgattaaataaaaaatacttcagagtgtacctgaaaaggttcactgcgaagatttgctctttaaaaatctggatcaagctgaaaattgaaacactgaacaacgaaagttgttcgtgagtctctcaaattttcgcaacacgatgatgaatcgtaagaaacatcttcgggttgtgaggttaagcgactaagcgtacacggtggatgccctggcagtcagaggcgatgaaggacgtgctaatctgcgataagcgtcggtaaggtgatatgaaccattataaccggcgatttccgaatggggaaacccagtgtgattcgtcacactatcattaactgaatccataggttaatgaggcgaaccgggggaactgaaacatctaagtaccccgaggaaaagaaatcaaccgagattcccccagtagcggcgagcgaacggggagcagcccagagcctgaatcagtgtgtgtgttagtggaagcgtctggaaaggcgtgcgatacagggtgacagccccgtacacaaaaatgcacatattgtgagctcgatgagtagggcgggacacgtggtatcctgtctgaatatggggggaccatcctccaaggctaaatactcctgactgaccgatagtgaaccagtaccgtgagggaaaggcgaaaagaaccccggcgaggggagtgaaaaagaacctgaaaccgtgtacgtacaagcagtgggagcacgcttaggcgtgtgactgcgtaccttttgtataatgggtcagcgacttatattctgtagcaaggttaaccgaataggggagccgaagggaaaccgagtcttaactgggcgttaagttgcagggtatagacccgaaacccggtgatctagccatgggcaggttgaaggttgggtaacactaactggaggaccgaaccgactaatgttgaaaaattagcggatgacttgtggctgggggtgaaaggccaatcaaaccgggagatagctggttctccccgaaagctatttaggtagcgcctcgtgaattcatctccgggggtagagcactgtttcggcaagggggtcatcccgacttaccaacccgatgcaaactgcgaataccggagaatgttatcacgggagacacacggcgggtgctaacgtccgtcgtgaagagggaaacaacccagaccgccagctaaggtcccaaagtcatggttaagtgggaaacgatgtgggaaggcccagacagccaggatgttggcttagaagcagccatcatttaaagaaagcgtaatagctcactggtcgagtcggcctgcgcggaagatgtaacggggctaaaccatgcaccgaagctgcggcagcgacgctgatgcgttgttgggtaggggagcgttctgtaagcctgtgaaggtgtgctgtgaggtatgctggaggtatcagaagtgcgaatgctgacataagtaacgataaagcgggtgaaaagcccgctcgccggaagaccaagggttcctgtccaacgttaatcggggcagggtgagtcgacccctaaggcgaggccgaaaggcgtagtcgatgggaaacaggttaatattcctgtacttggtgttactgcgaaggggggacggagaaggctatgttggccgggcgacggttgtcccggtttaagcgtgtaggctggttttccaggcaaatccggaaaactaaggctgaggcgtgatgacgaggcactacggtgctgaagcaacaaatgccctgcttccaggaaaagcctctaagcatcaggtaacatcaaatcgtaccccaaaccgacacaggtggtcaggtagagaataccaaggcgcttgagagaactcgggtgaaggaactaggcaaaatggtgccgtaacttcgggagaaggcacgctgatatgtaggtgaagtccctcgcggatggagctgaaatcagtcgaagataccagctggctgcaactgtttattaaaaacacagcactgtgcaaacacgaaagtggacgtatacggtgtgacgcctgcccggtgccggaaggttaattgatggggtcagcgcaagcgaagctcttgatcgaagccccggtaaacggcggccgtaactataacggtcctaaggtagcgaaattccttgtcgggtaagttccgacctgcacgaatggcgtaatgatggccaggctgtctccacccgagactcagtgaaattgaactcgctgtgaagatgcagtgtacccgcggcaagacggaaagaccccgtgaacctttactatagcttgacactgaacattgagccttgatgtgtaggataggtgggaggctttgaagtgtggacgccagtctgcatggagccgaccttgaaataccaccctttaatgtttgatgttctaacgttgacccgtaatccgggttgcggacagtgtctggtgggtagtttgactggggcggtctcctcctaaagagtaacggaggagcacgaaggttggctaatcctggtcggacatcaggaggttagtgcaatggcataagccagcttgactgcgagcgtgacggcgcgagcaggtgcgaaagcaggtcatagtgatccggtggttctgaatggaagggccatcgctcaacggataaaaggtactccggggataacaggctgataccgcccaagagttcatatcgacggcggtgtttggcacctcgatgtcggctcatcacatcctggggctgaagtaggtcccaagggtatggctgttcgccatttaaagtggtacgcgagctgggtttagaacgtcgtgagacagttcggtccctatctgccgtgggcgctggagaactgaggggggctgctcctagtacgagaggaccggagtggacgcatcactggtgttcgggttgtcatgccaatggcactgcccggtagctaaatgcggaagagataagtgctgaaagcatctaagcacgaaacttgccccgagatgagttctccctgactccttgagagtcctgaaggaacgttgaagacgacgacgttgataggccgggtgtgtaagcgcagcgatgcgttgagctaaccggtactaatgaaccgtgaggcttaaccttacaacgccgaaggtgttttggcggatgagagaaagattttcagcctgatacagattaaatcagaacgcagaagcggtctgataaaacagaatttgcctggcggccgtagcgcggtggtcccacctgaccccatgccgaactcagaagtgaaacgccgtagcgccgatggtagtgtggggtctccccatgcgagagtagggaactgccaggcatcaaattaagcagtaagccggtcataaaaccggtggttgtaaaagaattcggtggagcggtagttcagtcggttagaatacctgcctgtcacgcagggggtcgcgggttcgagtcccgtccgttccgccaccctaattaggggcgtagttcaattggtagagcaccggtctccaaaaccgggtgttgggagttcgagtctctccgcccctgccagaaatcatccttagcgaaagctaaggatttttgcgcgccgggaaatgtgcgcggaacccctatttgtttatttttctaaatacattcaaatatgtatccgctcatgagacaataaccctgataaatgcttcaataatattgaaaaaggaagagtatgagtattcaacatttccgtgtcgcccttattcccttttttgcggcattttgccttcctgtttttgctcacccagaaacgctggtgaaagtaaaagatgctgaagatcagttgggtgcacgagtgggttacatcgaactggatctcaacagcggtaagatccttgagagttttcgccccgaagaacgttttccaatgatgagcacttttaaagttctgctatgtggcgcggtattatcccgtgttgacgccgggcaagagcaactcggtcgccgcatacactattctcagaatgacttggttgagtactcaccagtcacagaaaagcatcttacggatggcatgacagtaagagaattatgcagtgctgcaataaccatgagtgataacactgcggccaacttacttctgacaacgatcggaggaccgaaggagctaaccgcttttttgcacaacatgggggatcatgtaactcgccttgatcgttgggaaccggagctgaatgaagccataccaaacgacgagcgtgacaccacgatgcctgcagcaatggcaacaacgttgcgcaaactattaactggcgaactacttactctagcttcccggcaacaattaatagactggatggaggcggataaagttgcaggaccacttctgcgctcggcccttccggctagctggtttattgctgataaatctggagccggtgagcgtgggtctcgcggtatcattgcagcactggggccagatggtaagccctcccgtatcgtagttatctacacgacggggagtcaggcaactatggatgaacgaaatagacagatcgctgagataggtgcctcactgattaagcattggtaactgcagaccaagtttactcatatatactttagattgatttaaaacttcatttttaatttaaaaggatctaggtgaagatcctttttgataatctcatgaccaaaatcccttaacgtgagttttcgttccactgagcgtcagaccccgtagaaaagatcaaaggatcttcttgagatcctttttttctgcgcgtaatctgctgcttgcaaacaaaaaaaccaccgctaccagcggtggtttgtttgccggatcaagagctaccaactctttttccgaaggtaactggcttcagcagagcgcagataccaaatactgtccttctagtgtagccgtagttaggccaccacttcaagaactctgtagcaccgcctacatacctcgctctgctaatcctgttaccagtggctgctgccagtggcgataagtcgtgtcttaccgggttggactcaagacgatagttaccggataaggcgcagcggtcgggctgaacggggggttcgtgcacacagcccagcttggagcgaacgacctacaccgaactgagatacctacagcgtgagctatgagaaagcgccacgcttcccgaagggagaaaggcggacaggtatccggtaagcggcagggtcggaacaggagagcgcacgagggagcttccagggggaaacgcctggtatctttatagtcctgtcgggtttcgccacctctgacttgagcgtcgatttttgtgatgctcgtcaggggggcggagcctatggaaaaacgccagcaacgcggcctttttacggttcctggccttttgctgg

SEQ ID NO: 23 - DNA, 7417 bp, Artificial
  Synthetic
agacttagggaccctgcggccgccattaattcctaatttttgttgacactctatcattgatagagttattttaccactccctatcagtgatagagaaaagtgaaatgaatagaccggccgctgagaaaaagcgaagcggcactgctctttaacaatttatcagacaatctgtgtgggcactcgaagatacggattcttaacgtcgcaagacgaaaaatgaataccaagtctcaagagtgaacacgtaattcattacgaagtttaattctttgagcgtcaaacttttaaattgaagagtttgatcatggctcagattgaacgctggcggcaggcctaacacatgcaagtcgaacggtaacaggaatcagcttgctgattcgctgacgagtggcggacgggtgagtaatgtctgggaaactgcctgatggagggggataactactggaaacggtagctaataccgcataatgtcgcaagaccaaaaagggggaccttcgggcctcttgccatcagatgtgcccagatgggattagcttgttggtggggtaacggctcaccaaggcgacgatccctagctggtctgagaggatgaccagccacactggaactgagacacggtccagactcctacgggaggcagcagtggggaatattgcacaatgggcgcaagcctgatgcagccatgccgcgtgtatgaagaaggccttcgggttgtaaagtactttcagcggggaggaagggagtaaagttaatacctttgctcattgacgttatccgcagaagaagcaccggctaactccgtgccagcagccgcggtaatacggagggtgcaagcgttaatcggaattactgggcgtaaagcgcacgcaggcggtttgttaagtcagatgtgaaatccccgggctcaacctgggaactgcatctgatactggcaagcttgagtctcgtagaggggggtagaattccaggtgtagcggtgaaatgcgtagagatctggaggaataccggtggcgaaggcggccccctggacgaagactgacgctcaggtgcgaaagcgtggggagcaaacaggattagataccctggtagtccacgccgtaaacgatgtcgacttggaggttgtgcccttgaggcgtggcttccggagctaacgcgttaagtcgaccgcctggggagtacggccgcaaggttaaaactcaaatgaattgacgggggcccgcacaagcggtggagcatgtggtttaattcgatgcaacgcgaagaaccttacctggtcttgacatccacggaagttttcagagatgagaatgtgccttcgggaaccgtgagacaggtgctgcatggctgtcgtcagctcgtgttgtgaaatgttgggttaagtcccgcaacgagcgcaacccttatcctttgttgccagcggtccggccgggaactcaaaggagactgccagtgataaactggaggaaggtggggacgacgtcaagtcatcatggcccttacgaccagggctacacacgtgctacaatggcgcatacaaagagaagcgacctcgcgagagcaagcggacctcataaagtgcgtcgtagtccggattggagtctgcaactcgactccatgaagtcggaatcgctagtaatcgtggatcagaatgccacggtgaatacgttcccgggccttgtacacaccgcccgtcacaccatgggagtgggttgcaaaagaagtaggtagcttaaccttcgggagggcgcttaccactttgtgattcatgactggggtgaagtcgtaacaaggtaaccgtaggggaacctgcggttggatcacctccttaccttaaagaagcgtactttgtagtgctcacacagattgtctgatagaaagtgaaaagcaaggcgtttacgcgttgggagtgaggctgaagagaataaggccgttcgctttctattaatgaaagctcaccctacacgaaaatatcacgcaacgcgtgataagcaattttcgtgtccccttcgtctagaggcccaggacaccgccctttcacggcggtaacaggggttcgaatcccctaggggacgccacttgctggtttgtgagtgaaagtcgccgaccttaatatctcaaaactcatcttcgggtgatgtttgagatatttgctctttaaaaatctggatcaagctgaaaattgaaacactgaacaacgagagttgttcgtgagtctctcaaattttcgcaacacgatgatgaatcgaaagaaacatcttcgggttgtgaggttaagcgactaagcgtacacggtggatgccctggcagtcagaggcgatgaaggacgtgctaatctgcgataagcgtcggtaaggtgatatgaaccattataaccggcgatttccgaatggggaaacccagtgtgattcgtcacactatcattaactgaatccataggttaatgaggcgaaccgggggaactgaaacatctaagtaccccgaggaaaagaaatcaaccgagattcccccagtagcggcgagcgaacggggagcagcccagagcctgaatcagtgtgtgtgttagtggaagcgtctggaaaggcgtgcgatacagggtgacagccccgtacacaaaaatgcacatattgtgagctcgatgagtagggcgggacacgtggtatcctgtctgaatatggggggaccatcctccaaggctaaatactcctgactgaccgatagtgaaccagtaccgtgagggaaaggcgaaaagaaccccggcgaggggagtgaaaaagaacctgaaaccgtgtacgtacaagcagtgggagcacgcttaggcgtgtgactgcgtaccttttgtataatgggtcagcgacttatattctgtagcaaggttaaccgaataggggagccgaagggaaaccgagtcttaactgggcgttaagttgcagggtatagacccgaaacccggtgatctagccatgggcaggttgaaggttgggtaacactaactggaggaccgaaccgactaatgttgaaaaattagcggatgacttgtggctgggggtgaaaggccaatcaaaccgggagatagctggttctccccgaaagctatttaggtagcgcctcgtgaattcatctccgggggtagagcactgtttcggcaagggggtcatcccgacttaccaacccgatgcaaactgcgaataccggagaatgttatcacgggagacacacggcgggtgctaacgtccgtcgtgaagagggaaacaacccagaccgccagctaaggtcccaaagtcatggttaagtgggaaacgatgtgggaaggcccagacagccaggatgttggcttagaagcagccatcatttaaagaaagcgtaatagctcactggtcgagtcggcctgcgcggaagatgtaacggggctaaaccatgcaccgaagctgcggcagcgacgctgatgcgttgttgggtaggggagcgttctgtaagcctgtgaaggtgtgctgtgaggtatgctggaggtatcagaagtgcgaatgctgacataagtaacgataaagcgggtgaaaagcccgctcgccggaagaccaagggttcctgtccaacgttaatcggggcagggtgagtcgacccctaaggcgaggccgaaaggcgtagtcgatgggaaacaggttaatattcctgtacttggtgttactgcgaaggggggacggagaaggctatgttggccgggcgacggttgtcccggtttaagcgtgtaggctggttttccaggcaaatccggaaaactaaggctgaggcgtgatgacgaggcactacggtgctgaagcaacaaatgccctgcttccaggaaaagcctctaagcatcaggtaacatcaaatcgtaccccaaaccgacacaggtggtcaggtagagaataccaaggcgcttgagagaactcgggtgaaggaactaggcaaaatggtgccgtaacttcgggagaaggcacgctgatatgtaggtgaagtccctcgcggatggagctgaaatcagtcgaagataccagctggctgcaactgtttattaaaaacacagcactgtgcaaacacgaaagtggacgtatacggtgtgacgcctgcccggtgccggaaggttaattgatggggtcagcgcaagcgaagctcttgatcgaagccccggtaaacggcggccgtaactataacggtcctaaggtagcgaaattccttgtcgggtaagttccgacctgcacgaatggcgtaatgatggccaggctgtctccacccgagactcagtgaaattgaactcgctgtgaagatgcagtgtacccgcggcaagacggaaagaccccgtgaacctttactatagcttgacactgaacattgagccttgatgtgtaggataggtgggaggctttgaagtgtggacgccagtctgcatggagccgaccttgaaataccaccctttaatgtttgatgttctaacgttgacccgtaatccgggttgcggacagtgtctggtgggtagtttgactggggcggtctcctcctaaagagtaacggaggagcacgaaggttggctaatcctggtcggacatcaggaggttagtgcaatggcataagccagcttgactgcgagcgtgacggcgcgagcaggtgcgaaagcaggtcatagtgatccggtggttctgaatggaagggccatcgctcaacggataaaaggtactccggggataacaggctgataccgcccaagagttcatatcgacggcggtgtttggcacctcgatgtcggctcatcacatcctggggctgaagtaggtcccaagggtatggctgttcgccatttaaagtggtacgcgagctgggtttagaacgtcgtgagacagttcggtccctatctgccgtgggcgctggagaactgaggggggctgctcctagtacgagaggaccggagtggacgcatcactggtgttcgggttgtcatgccaatggcactgcccggtagctaaatgcggaagagataagtgctgaaagcatctaagcacgaaacttgccccgagatgagttctccctgactccttgagagtcctgaaggaacgttgaagacgacgacgttgataggccgggtgtgtaagcgcagcgatgcgttgagctaaccggtactaatgaaccgtgaggcttaaccttacaacgccgaagctgttttggcggatgagagaagattttcagcctgatacagattaaatcagaacgcagaagcggtctgataaaacagaattgcctggcggccgtagcgcggtggtcccacctgaccccatgccgaactcagaagtgaaacgccgtagcgccgatggtagtgtggggtctccccatgcgagagtagggaactgccaggcatcaaataaaacgaaaggctcagtcgaaagactgggcctttcgttttatctgttgtttgtcggtgaacgctctcctgagtaggacaaatccgccgggagcggatttgaacgttgcgaagcaacggcccggagggtggcgggcaggacgcccgccataaactgccaggcatcaaattaagcagaaggccatcctgacggatggcctttttgcgtttctacaaactcttcctgtcgtcatatctacaagccggcgcgccgggaaatgtgcgcggaacccctatttgtttatttttctaaatacattcaaatatgtatccgctcatgagacaataaccctgataaatgcttcaataatattgaaaaaggaagagtatgagtattcaacatttccgtgtcgcccttattcccttttttgcggcattttgccttcctgtttttgctcacccagaaacgctggtgaaagtaaaagatgctgaagatcagttgggtgcacgagtgggttacatcgaactggatctcaacagcggtaagatccttgagagttttcgccccgaagaacgttttccaatgatgagcacttttaaagttctgctatgtggcgcggtattatcccgtgttgacgccgggcaagagcaactcggtcgccgcatacactattctcagaatgacttggttgagtactcaccagtcacagaaaagcatcttacggatggcatgacagtaagagaattatgcagtgctgcaataaccatgagtgataacactgcggccaacttacttctgacaacgatcggaggaccgaaggagctaaccgcttttttgcacaacatgggggatcatgtaactcgccttgatcgttgggaaccggagctgaatgaagccataccaaacgacgagcgtgacaccacgatgcctgcagcaatggcaacaacgttgcgcaaactattaactggcgaactacttactctagcttcccggcaacaattaatagactggatggaggcggataaagttgcaggaccacttctgcgctcggcccttccggctagctggtttattgctgataaatctggagccggtgagcgtgggtctcgcggtatcattgcagcactggggccagatggtaagccctcccgtatcgtagttatctacacgacggggagtcaggcaactatggatgaacgaaatagacagatcgctgagataggtgcctcactgattaagcattggtaactgcagaccaagtttactcatatatactttagattgatttaaaacttcatttttaatttaaaaggatctaggtgaagatcctttttgataatctcatgaccaaaatcccttaacgtgagttttcgttccactgagcgtcagaccccgtagaaaagatcaaaggatcttcttgagatcctttttttctgcgcgtaatctgctgcttgcaaacaaaaaaaccaccgctaccagcggtggtttgtttgccggatcaagagctaccaactctttttccgaaggtaactggcttcagcagagcgcagataccaaatactgtccttctagtgtagccgtagttaggccaccacttcaagaactctgtagcaccgcctacatacctcgctctgctaatcctgttaccagtggctgctgccagtggcgataagtcgtgtcttaccgggttggactcaagacgatagttaccggataaggcgcagcggtcgggctgaacggggggttcgtgcacacagcccagcttggagcgaacgacctacaccgaactgagatacctacagcgtgagctatgagaaagcgccacgcttcccgaagggagaaaggcggacaggtatccggtaagcggcagggtcggaacaggagagcgcacgagggagcttccagggggaaacgcctggtatctttatagtcctgtcgggtttcgccacctctgacttgagcgtcgatttttgtgatgctcgtcaggggggcggagcctatggaaaaacgccagcaacgcggcctttttacggttcctggccttttgctgg

SEQ ID NO: 24 - DNA, 7424 bp, Artificial
  Synthetic
agacttagggaccctgcggccgccattaattcctaatttttgttgacactctatcattgatagagttattttaccactccctatcagtgatagagaaaagtgaaatgaatagaccggccgctgagaaaaagcgaagcggcgcactgctctttaacaatttatcagacaatctgtgtgggtactcgaagatacggattcttaacgtcgcaagacgataaatgaataccaagtctcaagagtgaacacgtaattcattacgaagtttaattctttgagcatcaaacttttaaattgaagagtttgatcatggctcagattgaacgctggcggcaggcctaacacatgcaagtcgaacggtaacaggaatcagcttgctgattcgctgacgagtggcggacgggtgagtaatgtctgggaaactgcctgatggagggggataactactggaaacggtagctaataccgcataatgtcgcaagaccaaaaagggggaccttcgggcctcttgccatcagatgtgcccagatgggattagcttgttggtggggtaacggctcaccaaggcgacgatccctagctggtctgagaggatgaccagccacactggaactgagacacggtccagactcctacgggaggcagcagtggggaatattgcacaatgggcgcaagcctgatgcagccatgccgcgtgtatgaagaaggccttcgggttgtaaagtactttcagcggggaggaagggagtaaagttaatacctttgctcattgacgttatccgcagaagaagcaccggctaactccgtgccagcagccgcggtaatacggagggtgcaagcgttaatcggaattactgggcgtaaagcgcacgcaggcggtttgttaagtcagatgtgaaatccccgggctcaacctgggaactgcatctgatactggcaagcttgagtctcgtagaggggggtagaattccaggtgtagcggtgaaatgcgtagagatctggaggaataccggtggcgaaggcggccccctggacgaagactgacgctcaggtgcgaaagcgtggggagcaaacaggattagataccctggtagtccacgccgtaaacgatgtcgacttggaggttgtgcccttgaggcgtggcttccggagctaacgcgttaagtcgaccgcctggggagtacggccgcaaggttaaaactcaaatgaattgacgggggcccgcacaagcggtggagcatgtggtttaattcgatgcaacgcgaagaaccttacctggtcttgacatccacggaagttttcagagatgagaatgtgccttcgggaaccgtgagacaggtgctgcatggctgtcgtcagctcgtgttgtgaaatgttgggttaagtcccgcaacgagcgcaacccttatcctttgttgccagcggtccggccgggaactcaaaggagactgccagtgataaactggaggaaggtggggacgacgtcaagtcatcatggcccttacgaccagggctacacacgtgctacaatggcgcatacaaagagaagcgacctcgcgagagcaagcggacctcataaagtgcgtcgtagtccggattggagtctgcaactcgactccatgaagtcggaatcgctagtaatcgtggatcagaatgccacggtgaatacgttcccgggccttgtacacaccgcccgtcacaccatgggagtgggttgcaaaagaagtaggtagcttaaccttcgggagggcgcttaccactttgtgattcatgactggggtgaagtcgtaacaaggtaaccgtaggggaacctgcggttggatcatgtggttaccttaaagaagcgtactttgcagtgctcacacagattgtctgatgaaaatgagcagtaaaacctctacaggcttgtagctcaggtggttagagcgcacccctgataagggtgaggtcggtggttcaagtccactcaggcctaccaaatttgcacggcaaatttgaagaggttttaactacatgttatggggctatagctcagctgggagagcgcctgctttgcacgcaggaggtctgcggttcgatcccgcatagctccaccatctctgtagtgattaaataaaaaatacttcagagtgtacctgaaaaggttcactgcgaagatttgctctttaaaaatctggatcaagctgaaaattgaaacactgaacaacgaaagttgttcgtgagtctctcaaattttcgcaacacgatgatgaatcgtaagaaacatcttcgggttgtgaggttaagcgactaagcgtacacggtggatgccctggcagtcagaggcgatgaaggacgtgctaatctgcgataagcgtcggtaaggtgatatgaaccattataaccggcgatttccgaatggggaaacccagtgtgattcgtcacactatcattaactgaatccataggttaatgaggcgaaccgggggaactgaaacatctaagtaccccgaggaaaagaaatcaaccgagattcccccagtagcggcgagcgaacggggagcagcccagagcctgaatcagtgtgtgtgttagtggaagcgtctggaaaggcgtgcgatacagggtgacagccccgtacacaaaaatgcacatattgtgagctcgatgagtagggcgggacacgtggtatcctgtctgaatatggggggaccatcctccaaggctaaatactcctgactgaccgatagtgaaccagtaccgtgagggaaaggcgaaaagaaccccggcgaggggagtgaaaaagaacctgaaaccgtgtacgtacaagcagtgggagcacgcttaggcgtgtgactgcgtaccttttgtataatgggtcagcgacttatattctgtagcaaggttaaccgaataggggagccgaagggaaaccgagtcttaactgggcgttaagttgcagggtatagacccgaaacccggtgatctagccatgggcaggttgaaggttgggtaacactaactggaggaccgaaccgactaatgttgaaaaattagcggatgacttgtggctgggggtgaaaggccaatcaaaccgggagatagctggttctccccgaaagctatttaggtagcgcctcgtgaattcatctccgggggtagagcactgtttcggcaagggggtcatcccgacttaccaacccgatgcaaactgcgaataccggagaatgttatcacgggagacacacggcgggtgctaacgtccgtcgtgaagagggaaacaacccagaccgccagctaaggtcccaaagtcatggttaagtgggaaacgatgtgggaaggcccagacagccaggatgttggcttagaagcagccatcatttaaagaaagcgtaatagctcactggtcgagtcggcctgcgcggaagatgtaacggggctaaaccatgcaccgaagctgcggcagcgacgctgatgcgttgttgggtaggggagcgttctgtaagcctgtgaaggtgtgctgtgaggtatgctggaggtatcagaagtgcgaatgctgacataagtaacgataaagcgggtgaaaagcccgctcgccggaagaccaagggttcctgtccaacgttaatcggggcagggtgagtcgacccctaaggcgaggccgaaaggcgtagtcgatgggaaacaggttaatattcctgtacttggtgttactgcgaaggggggacggagaaggctatgttggccgggcgacggttgtcccggtttaagcgtgtaggctggttttccaggcaaatccggaaaactaaggctgaggcgtgatgacgaggcactacggtgctgaagcaacaaatgccctgcttccaggaaaagcctctaagcatcaggtaacatcaaatcgtaccccaaaccgacacaggtggtcaggtagagaataccaaggcgcttgagagaactcgggtgaaggaactaggcaaaatggtgccgtaacttcgggagaaggcacgctgatatgtaggtgaagtccctcgcggatggagctgaaatcagtcgaagataccagctggctgcaactgtttattaaaaacacagcactgtgcaaacacgaaagtggacgtatacggtgtgacgcctgcccggtgccggaaggttaattgatggggtcagcgcaagcgaagctcttgatcgaagccccggtaaacggcggccgtaactataacggtcctaaggtagcgaaattccttgtcgggtaagttccgacctgcacgaatggcgtaatgatggccaggctgtctccacccgagactcagtgaaattgaactcgctgtgaagatgcagtgtacccgcggcaagacggaaagaccccgtgaacctttactatagcttgacactgaacattgagccttgatgtgtaggataggtgggaggctttgaagtgtggacgccagtctgcatggagccgaccttgaaataccaccctttaatgtttgatgttctaacgttgacccgtaatccgggttgcggacagtgtctggtgggtagtttgactggggcggtctcctcctaaagagtaacggaggagcacgaaggttggctaatcctggtcggacatcaggaggttagtgcaatggcataagccagcttgactgcgagcgtgacggcgcgagcaggtgcgaaagcaggtcatagtgatccggtggttctgaatggaagggccatcgctcaacggataaaaggtactccggggataacaggctgataccgcccaagagttcatatcgacggcggtgtttggcacctcgatgtcggctcatcacatcctggggctgaagtaggtcccaagggtatggctgttcgccatttaaagtggtacgcgagctgggtttagaacgtcgtgagacagttcggtccctatctgccgtgggcgctggagaactgaggggggctgctcctagtacgagaggaccggagtggacgcatcactggtgttcgggttgtcatgccaatggcactgcccggtagctaaatgcggaagagataagtgctgaaagcatctaagcacgaaacttgccccgagatgagttctccctgactccttgagagtcctgaaggaacgttgaagacgacgacgttgataggccgggtgtgtaagcgcagcgatgcgttgagctaaccggtactaatgaaccgtgaggcttaaccttacaacgccgaaggtgttttggcggatgagagaaagattttcagcctgatacagattaaatcagaacgcagaagcggtctgataaaacagaatttgcctggcggccgtagcgcggtggtcccacctgaccccatgccgaactcagaagtgaaacgccgtagcgccgatggtagtgtggggtctccccatgcgagagtagggaactgccaggcatcaaattaagcagtaagccggtcataaaaccggtggttgtaaaagaattcggtggagcggtagttcagtcggttagaatacctgcctgtcacgcagggggtcgcgggttcgagtcccgtccgttccgccaccctaattaggggcgtagttcaattggtagagcaccggtctccaaaaccgggtgttgggagttcgagtctctccgcccctgccagaaatcatccttagcgaaagctaaggatttttgcgcgccgggaaatgtgcgcggaacccctatttgtttatttttctaaatacattcaaatatgtatccgctcatgagacaataaccctgataaatgcttcaataatattgaaaaaggaagagtatgagtattcaacatttccgtgtcgcccttattcccttttttgcggcattttgccttcctgtttttgctcacccagaaacgctggtgaaagtaaaagatgctgaagatcagttgggtgcacgagtgggttacatcgaactggatctcaacagcggtaagatccttgagagttttcgccccgaagaacgttttccaatgatgagcacttttaaagttctgctatgtggcgcggtattatcccgtgttgacgccgggcaagagcaactcggtcgccgcatacactattctcagaatgacttggttgagtactcaccagtcacagaaaagcatcttacggatggcatgacagtaagagaattatgcagtgctgcaataaccatgagtgataacactgcggccaacttacttctgacaacgatcggaggaccgaaggagctaaccgcttttttgcacaacatgggggatcatgtaactcgccttgatcgttgggaaccggagctgaatgaagccataccaaacgacgagcgtgacaccacgatgcctgcagcaatggcaacaacgttgcgcaaactattaactggcgaactacttactctagcttcccggcaacaattaatagactggatggaggcggataaagttgcaggaccacttctgcgctcggcccttccggctagctggtttattgctgataaatctggagccggtgagcgtgggtctcgcggtatcattgcagcactggggccagatggtaagccctcccgtatcgtagttatctacacgacggggagtcaggcaactatggatgaacgaaatagacagatcgctgagataggtgcctcactgattaagcattggtaactgcagaccaagtttactcatatatactttagattgatttaaaacttcatttttaatttaaaaggatctaggtgaagatcctttttgataatctcatgaccaaaatcccttaacgtgagttttcgttccactgagcgtcagaccccgtagaaaagatcaaaggatcttcttgagatcctttttttctgcgcgtaatctgctgcttgcaaacaaaaaaaccaccgctaccagcggtggtttgtttgccggatcaagagctaccaactctttttccgaaggtaactggcttcagcagagcgcagataccaaatactgtccttctagtgtagccgtagttaggccaccacttcaagaactctgtagcaccgcctacatacctcgctctgctaatcctgttaccagtggctgctgccagtggcgataagtcgtgtcttaccgggttggactcaagacgatagttaccggataaggcgcagcggtcgggctgaacggggggttcgtgcacacagcccagcttggagcgaacgacctacaccgaactgagatacctacagcgtgagctatgagaaagcgccacgcttcccgaagggagaaaggcggacaggtatccggtaagcggcagggtcggaacaggagagcgcacgagggagcttccagggggaaacgcctggtatctttatagtcctgtcgggtttcgccacctctgacttgagcgtcgatttttgtgatgctcgtcaggggggcggagcctatggaaaaacgccagcaacgcggcctttttacggttcctggccttttgctgg

SEQ ID NO: 25 - DNA, 7417 bp, Artificial
  Synthetic
agacttagggaccctgcggccgccattaattcctaatttttgttgacactctatcattgatagagttattttaccactccctatcagtgatagagaaaagtgaaatgaatagaccggccgctgagaaaaagcgaagcggcactgctctttaacaatttatcagacaatctgtgtgggcactcgaagatacggattcttaacgtcgcaagacgaaaaatgaataccaagtctcaagagtgaacacgtaattcattacgaagtttaattctttgagcgtcaaacttttaaattgaagagtttgatcatggctcagattgaacgctggcggcaggcctaacacatgcaagtcgaacggtaacaggaatcagcttgctgattcgctgacgagtggcggacgggtgagtaatgtctgggaaactgcctgatggagggggataactactggaaacggtagctaataccgcataatgtcgcaagaccaaaaagggggaccttcgggcctcttgccatcagatgtgcccagatgggattagcttgttggtggggtaacggctcaccaaggcgacgatccctagctggtctgagaggatgaccagccacactggaactgagacacggtccagactcctacgggaggcagcagtggggaatattgcacaatgggcgcaagcctgatgcagccatgccgcgtgtatgaagaaggccttcgggttgtaaagtactttcagcggggaggaagggagtaaagttaatacctttgctcattgacgttatccgcagaagaagcaccggctaactccgtgccagcagccgcggtaatacggagggtgcaagcgttaatcggaattactgggcgtaaagcgcacgcaggcggtttgttaagtcagatgtgaaatccccgggctcaacctgggaactgcatctgatactggcaagcttgagtctcgtagaggggggtagaattccaggtgtagcggtgaaatgcgtagagatctggaggaataccggtggcgaaggcggccccctggacgaagactgacgctcaggtgcgaaagcgtggggagcaaacaggattagataccctggtagtccacgccgtaaacgatgtcgacttggaggttgtgcccttgaggcgtggcttccggagctaacgcgttaagtcgaccgcctggggagtacggccgcaaggttaaaactcaaatgaattgacgggggcccgcacaagcggtggagcatgtggtttaattcgatgcaacgcgaagaaccttacctggtcttgacatccacggaagttttcagagatgagaatgtgccttcgggaaccgtgagacaggtgctgcatggctgtcgtcagctcgtgttgtgaaatgttgggttaagtcccgcaacgagcgcaacccttatcctttgttgccagcggtccggccgggaactcaaaggagactgccagtgataaactggaggaaggtggggacgacgtcaagtcatcatggcccttacgaccagggctacacacgtgctacaatggcgcatacaaagagaagcgacctcgcgagagcaagcggacctcataaagtgcgtcgtagtccggattggagtctgcaactcgactccatgaagtcggaatcgctagtaatcgtggatcagaatgccacggtgaatacgttcccgggccttgtacacaccgcccgtcacaccatgggagtgggttgcaaaagaagtaggtagcttaaccttcgggagggcgcttaccactttgtgattcatgactggggtgaagtcgtaacaaggtaaccgtaggggaacctgcggttggatcatgtggttaccttaaagaagcgtactttgtagtgctcacacagattgtctgatagaaagtgaaaagcaaggcgtttacgcgttgggagtgaggctgaagagaataaggccgttcgctttctattaatgaaagctcaccctacacgaaaatatcacgcaacgcgtgataagcaattttcgtgtccccttcgtctagaggcccaggacaccgccctttcacggcggtaacaggggttcgaatcccctaggggacgccacttgctggtttgtgagtgaaagtcgccgaccttaatatctcaaaactcatcttcgggtgatgtttgagatatttgctctttaaaaatctggatcaagctgaaaattgaaacactgaacaacgagagttgttcgtgagtctctcaaattttcgcaacacgatgatgaatcgaaagaaacatcttcgggttgtgaggttaagcgactaagcgtacacggtggatgccctggcagtcagaggcgatgaaggacgtgctaatctgcgataagcgtcggtaaggtgatatgaaccattataaccggcgatttccgaatggggaaacccagtgtgattcgtcacactatcattaactgaatccataggttaatgaggcgaaccgggggaactgaaacatctaagtaccccgaggaaaagaaatcaaccgagattcccccagtagcggcgagcgaacggggagcagcccagagcctgaatcagtgtgtgtgttagtggaagcgtctggaaaggcgtgcgatacagggtgacagccccgtacacaaaaatgcacatattgtgagctcgatgagtagggcgggacacgtggtatcctgtctgaatatggggggaccatcctccaaggctaaatactcctgactgaccgatagtgaaccagtaccgtgagggaaaggcgaaaagaaccccggcgaggggagtgaaaaagaacctgaaaccgtgtacgtacaagcagtgggagcacgcttaggcgtgtgactgcgtaccttttgtataatgggtcagcgacttatattctgtagcaaggttaaccgaataggggagccgaagggaaaccgagtcttaactgggcgttaagttgcagggtatagacccgaaacccggtgatctagccatgggcaggttgaaggttgggtaacactaactggaggaccgaaccgactaatgttgaaaaattagcggatgacttgtggctgggggtgaaaggccaatcaaaccgggagatagctggttctccccgaaagctatttaggtagcgcctcgtgaattcatctccgggggtagagcactgtttcggcaagggggtcatcccgacttaccaacccgatgcaaactgcgaataccggagaatgttatcacgggagacacacggcgggtgctaacgtccgtcgtgaagagggaaacaacccagaccgccagctaaggtcccaaagtcatggttaagtgggaaacgatgtgggaaggcccagacagccaggatgttggcttagaagcagccatcatttaaagaaagcgtaatagctcactggtcgagtcggcctgcgcggaagatgtaacggggctaaaccatgcaccgaagctgcggcagcgacgctgatgcgttgttgggtaggggagcgttctgtaagcctgtgaaggtgtgctgtgaggtatgctggaggtatcagaagtgcgaatgctgacataagtaacgataaagcgggtgaaaagcccgctcgccggaagaccaagggttcctgtccaacgttaatcggggcagggtgagtcgacccctaaggcgaggccgaaaggcgtagtcgatgggaaacaggttaatattcctgtacttggtgttactgcgaaggggggacggagaaggctatgttggccgggcgacggttgtcccggtttaagcgtgtaggctggttttccaggcaaatccggaaaactaaggctgaggcgtgatgacgaggcactacggtgctgaagcaacaaatgccctgcttccaggaaaagcctctaagcatcaggtaacatcaaatcgtaccccaaaccgacacaggtggtcaggtagagaataccaaggcgcttgagagaactcgggtgaaggaactaggcaaaatggtgccgtaacttcgggagaaggcacgctgatatgtaggtgaagtccctcgcggatggagctgaaatcagtcgaagataccagctggctgcaactgtttattaaaaacacagcactgtgcaaacacgaaagtggacgtatacggtgtgacgcctgcccggtgccggaaggttaattgatggggtcagcgcaagcgaagctcttgatcgaagccccggtaaacggcggccgtaactataacggtcctaaggtagcgaaattccttgtcgggtaagttccgacctgcacgaatggcgtaatgatggccaggctgtctccacccgagactcagtgaaattgaactcgctgtgaagatgcagtgtacccgcggcaagacggaaagaccccgtgaacctttactatagcttgacactgaacattgagccttgatgtgtaggataggtgggaggctttgaagtgtggacgccagtctgcatggagccgaccttgaaataccaccctttaatgtttgatgttctaacgttgacccgtaatccgggttgcggacagtgtctggtgggtagtttgactggggcggtctcctcctaaagagtaacggaggagcacgaaggttggctaatcctggtcggacatcaggaggttagtgcaatggcataagccagcttgactgcgagcgtgacggcgcgagcaggtgcgaaagcaggtcatagtgatccggtggttctgaatggaagggccatcgctcaacggataaaaggtactccggggataacaggctgataccgcccaagagttcatatcgacggcggtgtttggcacctcgatgtcggctcatcacatcctggggctgaagtaggtcccaagggtatggctgttcgccatttaaagtggtacgcgagctgggtttagaacgtcgtgagacagttcggtccctatctgccgtgggcgctggagaactgaggggggctgctcctagtacgagaggaccggagtggacgcatcactggtgttcgggttgtcatgccaatggcactgcccggtagctaaatgcggaagagataagtgctgaaagcatctaagcacgaaacttgccccgagatgagttctccctgactccttgagagtcctgaaggaacgttgaagacgacgacgttgataggccgggtgtgtaagcgcagcgatgcgttgagctaaccggtactaatgaaccgtgaggcttaaccttacaacgccgaagctgttttggcggatgagagaagattttcagcctgatacagattaaatcagaacgcagaagcggtctgataaaacagaattgcctggcggccgtagcgcggtggtcccacctgaccccatgccgaactcagaagtgaaacgccgtagcgccgatggtagtgtggggtctccccatgcgagagtagggaactgccaggcatcaaataaaacgaaaggctcagtcgaaagactgggcctttcgttttatctgttgtttgtcggtgaacgctctcctgagtaggacaaatccgccgggagcggatttgaacgttgcgaagcaacggcccggagggtggcgggcaggacgcccgccataaactgccaggcatcaaattaagcagaaggccatcctgacggatggcctttttgcgtttctacaaactcttcctgtcgtcatatctacaagccggcgcgccgggaaatgtgcgcggaacccctatttgtttatttttctaaatacattcaaatatgtatccgctcatgagacaataaccctgataaatgcttcaataatattgaaaaaggaagagtatgagtattcaacatttccgtgtcgcccttattcccttttttgcggcattttgccttcctgtttttgctcacccagaaacgctggtgaaagtaaaagatgctgaagatcagttgggtgcacgagtgggttacatcgaactggatctcaacagcggtaagatccttgagagttttcgccccgaagaacgttttccaatgatgagcacttttaaagttctgctatgtggcgcggtattatcccgtgttgacgccgggcaagagcaactcggtcgccgcatacactattctcagaatgacttggttgagtactcaccagtcacagaaaagcatcttacggatggcatgacagtaagagaattatgcagtgctgcaataaccatgagtgataacactgcggccaacttacttctgacaacgatcggaggaccgaaggagctaaccgcttttttgcacaacatgggggatcatgtaactcgccttgatcgttgggaaccggagctgaatgaagccataccaaacgacgagcgtgacaccacgatgcctgcagcaatggcaacaacgttgcgcaaactattaactggcgaactacttactctagcttcccggcaacaattaatagactggatggaggcggataaagttgcaggaccacttctgcgctcggcccttccggctagctggtttattgctgataaatctggagccggtgagcgtgggtctcgcggtatcattgcagcactggggccagatggtaagccctcccgtatcgtagttatctacacgacggggagtcaggcaactatggatgaacgaaatagacagatcgctgagataggtgcctcactgattaagcattggtaactgcagaccaagtttactcatatatactttagattgatttaaaacttcatttttaatttaaaaggatctaggtgaagatcctttttgataatctcatgaccaaaatcccttaacgtgagttttcgttccactgagcgtcagaccccgtagaaaagatcaaaggatcttcttgagatcctttttttctgcgcgtaatctgctgcttgcaaacaaaaaaaccaccgctaccagcggtggtttgtttgccggatcaagagctaccaactctttttccgaaggtaactggcttcagcagagcgcagataccaaatactgtccttctagtgtagccgtagttaggccaccacttcaagaactctgtagcaccgcctacatacctcgctctgctaatcctgttaccagtggctgctgccagtggcgataagtcgtgtcttaccgggttggactcaagacgatagttaccggataaggcgcagcggtcgggctgaacggggggttcgtgcacacagcccagcttggagcgaacgacctacaccgaactgagatacctacagcgtgagctatgagaaagcgccacgcttcccgaagggagaaaggcggacaggtatccggtaagcggcagggtcggaacaggagagcgcacgagggagcttccagggggaaacgcctggtatctttatagtcctgtcgggtttcgccacctctgacttgagcgtcgatttttgtgatgctcgtcaggggggcggagcctatggaaaaacgccagcaacgcggcctttttacggttcctggccttttgctgg

SEQ ID NO: 26 - DNA, 7324 bp, Artificial
  Synthetic
agacttagggaccctgcggccgccattaattcctaatttttgttgacactctatcattgatagagttattttaccactccctatcagtgatagagaaaagtgaaatgaatagaccggccgctgagaaaaagcgaagcggctctttaacaatttatcagacaatctgtgtgggcactcgaagatacggattcttaacgtcgcaagacgaaaaatgaataccaagtctcaagagtgaacacgtaattcattacgaagtttaattctttgagcatcaaacttttaaattgaagagtttgatcatggctcagattgaacgctggcggcaggcctaacacatgcaagtcgaacggtaacaggaaacagcttgctgtttcgctgacgagtggcggacgggtgagtaatgtctgggaaactgcctgatggagggggataactactggaaacggtagctaataccgcataacgtcgcaagaccaaagagggggaccttcgggcctcttgccatcggatgtgcccagatgggattagctagtaggtggggtaacggctcacctaggcgacgatccctagctggtctgagaggatgaccagccacactggaactgagacacggtccagactcctacgggaggcagcagtggggaatattgcacaatgggcgcaagcctgatgcagccatgccgcgtgtatgaagaaggccttcgggttgtaaagtactttcagcggggaggaagggagtaaagttaatacctttgctcattgacgttacccgcagaagaagcaccggctaactccgtgccagcagccgcggtaatacggagggtgcaagcgttaatcggaattactgggcgtaaagcgcacgcaggcggtttgttaagtcagatgtgaaatccccgggctcaacctgggaactgcatctgatactggcaagcttgagtctcgtagaggggggtagaattccaggtgtagcggtgaaatgcgtagagatctggaggaatatcggtggcgaaggcggccccctggacgaagactgacgctcaggtgcgaaagcgtggggagcaaacaggattagataccctggtagtccacgccgtaaacgatgtcgacttggaggttgtgcccttgaggcgtggcttccggagctaacgcgttaagtcgaccgcctggggagtacggccgcaaggttaaaactcaaatgaattgacgggggcccgcacaagcggtggagcatgtggtttaattcgatgcaacgcgaagaaccttacctggtcttgacatccacggaagttttcagagatgagaatgtgccttcgggaaccgtgagacaggtgctgcatggctgtcgtcagctcgtgttgtgaaatgttgggttaagtcccgcaacgagcgcaacccttatcctttgttgccagcggtccggccgggaactcaaaggagactgccagtgataaactggaggaaggtggggatgacgtcaagtcatcatggcccttacgaccagggctacacacgtgctacaatggcgcatacaaagagaagcgacctcgcgagagcaagcggacctcataaagtgcgtcgtagtccggattggagtctgcaactcgactccatgaagtcggaatcgctagtaatcgtggatcagaatgccacggtgaatacgttcccgggccttgtacacaccgcccgtcacaccatgggagtgggttgcaaaagaagtaggtagcttaaccttcgggagggcgcttaccactttgtgattcatgactggggtgaagtcgtaacaaggtaaccgtaggggaacctgcggttggatcacctccttaccttaaagaagcgtactttgcagtgctcacacagattgtctgatagaaagtgaaaagcaaggcgtcttgcgaagcagactgatacgtccccttcgtctagaggcccaggacaccgccctttcacggcggtaacaggggttcgaatcccctaggggacgccacttgctggtttgtgagtgaaagtcacctgccttaatatctcaaaactcatcttcgggtgatgtttgagatatttgctctttaaaaatctggatcaagctgaaaattgaaacactgaacaacgaaagttgttcgtgagtctctcgaattttcgcaacacgatgatgaatcgaaagaaacatcttcgggttgtgaggttaagcgactaagcgtacacggtggatgccctggcagtcagaggcgatgaaggacgtgctaatctgcgataagcgtcggtaaggtgatatgaaccgttataaccggcgatttccgaatggggaaacccagtgtgtttcgacacactatcattaactgaatccataggttaatgaggcgaaccgggggaactgaaacatctaagtaccccgaggaaaagaaatcaaccgagattcccccagtagcggcgagcgaacggggaggagcccagagcctgaatcagtgtgtgtgttagtggaagcgtctggaaaggcgcgcgatacagggtgacagccccgtacacaaaaatacacatattgtgagctcgatgagtagggcgggacacgtggtatcctgtctgaatatggggggaccatcctccaaggctaaatactcctgactgaccgatagtgaaccagtaccgtgagggaaaggcgaaaagaaccccggcgaggggagtgaaaaagaacctgaaaccgtgtacgtacaagcagtgggagcacgcttaggcgtgtgactgcgtaccttttgtataatgggtcagcgacttatattctgtagcaaggttaaccgaataggggagccgaagggaaaccgagtcttaactgggcgttaagttgcagggtatagacccgaaacccggtgatctagccatgggcaggttgaaggttgggtaacactaactggaggaccgaaccgactaatgttgaaaaattagcggatgacttgtggctgggggtgaaaggccaatcaaaccgggagatagctggttctccccgaaagctatttaggtagcgcctcgtgaattcatctccgggggtagagcactgtttcggcaagggggtcatcccgacttaccaacccgatgcaaactgcgaataccggagaatgttatcacgggagacacacggcgggtgctaacgtccgtcgtgaagagggaaacaacccagaccgccagctaaggtcccaaagtcatggttaagtgggaaacgatgtgggaaggcccagacagccaggatgttggcttagaagcagccatcatttaaagaaagcgtaatagctcactggtcgagtcggcctgcgcggaagatgtaacggggctaaaccatgcaccgaagctgcggcagcgacgcttatgcgttgttgggtaggggagcgttctgtaagcctgcgaaggtgtgctgtgaggcatgctggaggtatcagaagtgcgaatgctgacataagtaacgataaagcgggtgaaaagcccgctcgccggaagaccaagggttcctgtccaacgttaatcggggcagggtgagtcgacccctaagacgaggccgaaaggcgtagtcgatgggaaacaggttaatattcctgtacttggtgttactgcgaaggggggacggagaaggctatgttggccgggcgacggttgtcccggtttaagcgtgtaggctggttttccaggcaaatccggaaaatcaaggctgaggcgtgatgacgaggcactacggtgctgaagcaacaaatgccctgcttccaggaaaagcctctaagcatcaggtaacatcaaatcgtaccccaaaccgacacaggtggtcaggtagagaataccaaggcgcttgagagaactcgggtgaaggaactaggcaaaatggtgccgtaacttcgggagaaggcacgctgatatgtaggtgaagtcccttgcggatggagctgaaatcagtcgaagataccagctggctgcaactgtttattaaaaacacagcactgtgcaaacacgaaagtggacgtatacggtgtgacgcctgcccggtgccggaaggttaattgatggggtcagcgcaagcgaagctcttgatcgaagccccggtaaacggcggccgtaactataacggtcctaaggtagcgaaattccttgtcgggtaagttccgacctgcacgaatggcgtaatgatggccaggctgtctccacccgagactcagtgaaattgaactcgctgtgaagatgcagtgtacccgcggcaagacggaaagaccccgtgaacctttactatagcttgacactgaacattgagccttgatgtgtaggataggtgggaggctttgaagtgtggacgccagtctgcatggagccggccttgaaataccaccctttaatgtttgatgttctaacgtggacccgtgatccgggttgcggacagtgtctggtgggtagtttgactggggcggtctcctcctaaagagtaacggaggagcacgaaggttggctaatcctggtcggacatcaggaggttagtgcaatggcataagccagcttgactgcgagcgtgacggcgcgagcaggtgcgaaagcaggtcatagtgatccggtggttctgaatggaagggccatcgctcaacggataaaaggtactccggggataacaggctgataccgcccaagagttcatatcgacggcggtgtttggcacctcgatgtcggctcatcacatcctggggctgaagtaggtcccaagggtatggctgttcgccatttaaagtggtacgcgagctgggtttagaacgtcgtgagacagttcggtccctatctgccgtgggcgctggagaactgaggggggctgctcctagtacgagaggaccggagtggacgcatcactggtgttcgggttgtcatgccaatggcactgcccggtagctaaatgcggaagagataagtgctgaaagcatctaagcacgaaacttgccccgagatgagttctccctgaccctttaagggtcctgaaggaacgttgaagacgacgacgttgataggccgggtgtgtaagcgcagcgatgcgttgagctaaccggtactaatgaaccgtgaggcttaaccttacaacgccgaaggtgttttggcggatgagagaagattttcagcctgatacagattaaatcagaacgcagaagcggtctgataaaacagaatttgcctggcggccgtagcgcggtggtcccacctgaccccatgccgaactcagaagtgaaacgccgtagcgccgatggtagtgtggggtctccccatgcgagagtagggaactgccaggcatcaaattaagcagtaagccggtcataaaaccggtggttgtaaaagaattcggtggagcggtagttcagtcggttagaatacctgcctgtcacgcagggggtcgcgggttcgagtcccgtccgttccgccaccctaattaggggcgtagttcaattggtagagcaccggtctccaaaaccgggtgttgggagttcgagtctctccgcccctgccagaaatcatccttagcgaaagctaaggatttttgcgcgccgggaaatgtgcgcggaacccctatttgtttatttttctaaatacattcaaatatgtatccgctcatgagacaataaccctgataaatgcttcaataatattgaaaaaggaagagtatgagtattcaacatttccgtgtcgcccttattcccttttttgcggcattttgccttcctgtttttgctcacccagaaacgctggtgaaagtaaaagatgctgaagatcagttgggtgcacgagtgggttacatcgaactggatctcaacagcggtaagatccttgagagttttcgccccgaagaacgttttccaatgatgagcacttttaaagttctgctatgtggcgcggtattatcccgtgttgacgccgggcaagagcaactcggtcgccgcatacactattctcagaatgacttggttgagtactcaccagtcacagaaaagcatcttacggatggcatgacagtaagagaattatgcagtgctgcaataaccatgagtgataacactgcggccaacttacttctgacaacgatcggaggaccgaaggagctaaccgcttttttgcacaacatgggggatcatgtaactcgccttgatcgttgggaaccggagctgaatgaagccataccaaacgacgagcgtgacaccacgatgcctgcagcaatggcaacaacgttgcgcaaactattaactggcgaactacttactctagcttcccggcaacaattaatagactggatggaggcggataaagttgcaggaccacttctgcgctcggcccttccggctagctggtttattgctgataaatctggagccggtgagcgtgggtctcgcggtatcattgcagcactggggccagatggtaagccctcccgtatcgtagttatctacacgacggggagtcaggcaactatggatgaacgaaatagacagatcgctgagataggtgcctcactgattaagcattggtaactgcagaccaagtttactcatatatactttagattgatttaaaacttcatttttaatttaaaaggatctaggtgaagatcctttttgataatctcatgaccaaaatcccttaacgtgagttttcgttccactgagcgtcagaccccgtagaaaagatcaaaggatcttcttgagatcctttttttctgcgcgtaatctgctgcttgcaaacaaaaaaaccaccgctaccagcggtggtttgtttgccggatcaagagctaccaactctttttccgaaggtaactggcttcagcagagcgcagataccaaatactgtccttctagtgtagccgtagttaggccaccacttcaagaactctgtagcaccgcctacatacctcgctctgctaatcctgttaccagtggctgctgccagtggcgataagtcgtgtcttaccgggttggactcaagacgatagttaccggataaggcgcagcggtcgggctgaacggggggttcgtgcacacagcccagcttggagcgaacgacctacaccgaactgagatacctacagcgtgagctatgagaaagcgccacgcttcccgaagggagaaaggcggacaggtatccggtaagcggcagggtcggaacaggagagcgcacgagggagcttccagggggaaacgcctggtatctttatagtcctgtcgggtttcgccacctctgacttgagcgtcgatttttgtgatgctcgtcaggggggcggagcctatggaaaaacgccagcaacgcggcctttttacggttcctggccttttgctgg

SEQ ID NO: 27 - DNA, 7417 bp, Artificial
  Synthetic
agacttagggaccctgcggccgccattaattcctaatttttgttgacactctatcattgatagagttattttaccactccctatcagtgatagagaaaagtgaaatgaatagaccggccgctgagaaaaagcgaagcggcactgctctttaacaatttatcagacaatctgtgtgggcactcgaagatacggattcttaacgtcgcaagacgaaaaatgaataccaagtctcaagagtgaacacgtaattcattacgaagtttaattctttgagcgtcaaacttttaaattgaagagtttgatcatggctcagattgaacgctggcggcaggcctaacacatgcaagtcgaacggtaacaggaaacagcttgctgtttcgctgacgagtggcggacgggtgagtaatgtctgggaaactgcctgatggagggggataactactggaaacggtagctaataccgcataacgtcgcaagaccaaagagggggaccttcgggcctcttgccatcggatgtgcccagatgggattagctagtaggtggggtaacggctcacctaggcgacgatccctagctggtctgagaggatgaccagccacactggaactgagacacggtccagactcctacgggaggcagcagtggggaatattgcacaatgggcgcaagcctgatgcagccatgccgcgtgtatgaagaaggccttcgggttgtaaagtactttcagcggggaggaagggagtaaagttaatacctttgctcattgacgttacccgcagaagaagcaccggctaactccgtgccagcagccgcggtaatacggagggtgcaagcgttaatcggaattactgggcgtaaagcgcacgcaggcggtttgttaagtcagatgtgaaatccccgggctcaacctgggaactgcatctgatactggcaagcttgagtctcgtagaggggggtagaattccaggtgtagcggtgaaatgcgtagagatctggaggaatatcggtggcgaaggcggccccctggacgaagactgacgctcaggtgcgaaagcgtggggagcaaacaggattagataccctggtagtccacgccgtaaacgatgtcgacttggaggttgtgcccttgaggcgtggcttccggagctaacgcgttaagtcgaccgcctggggagtacggccgcaaggttaaaactcaaatgaattgacgggggcccgcacaagcggtggagcatgtggtttaattcgatgcaacgcgaagaaccttacctggtcttgacatccacggaagttttcagagatgagaatgtgccttcgggaaccgtgagacaggtgctgcatggctgtcgtcagctcgtgttgtgaaatgttgggttaagtcccgcaacgagcgcaacccttatcctttgttgccagcggtccggccgggaactcaaaggagactgccagtgataaactggaggaaggtggggatgacgtcaagtcatcatggcccttacgaccagggctacacacgtgctacaatggcgcatacaaagagaagcgacctcgcgagagcaagcggacctcataaagtgcgtcgtagtccggattggagtctgcaactcgactccatgaagtcggaatcgctagtaatcgtggatcagaatgccacggtgaatacgttcccgggccttgtacacaccgcccgtcacaccatgggagtgggttgcaaaagaagtaggtagcttaaccttcgggagggcgcttaccactttgtgattcatgactggggtgaagtcgtaacaaggtaaccgtaggggaacctgcggttggatcacctccttaccttaaagaagcgtactttgtagtgctcacacagattgtctgatagaaagtgaaaagcaaggcgtttacgcgttgggagtgaggctgaagagaataaggccgttcgctttctattaatgaaagctcaccctacacgaaaatatcacgcaacgcgtgataagcaattttcgtgtccccttcgtctagaggcccaggacaccgccctttcacggcggtaacaggggttcgaatcccctaggggacgccacttgctggtttgtgagtgaaagtcgccgaccttaatatctcaaaactcatcttcgggtgatgtttgagatatttgctctttaaaaatctggatcaagctgaaaattgaaacactgaacaacgagagttgttcgtgagtctctcaaattttcgcaacacgatgatgaatcgaaagaaacatcttcgggttgtgaggttaagcgactaagcgtacacggtggatgccctggcagtcagaggcgatgaaggacgtgctaatctgcgataagcgtcggtaaggtgatatgaaccgttataaccggcgatttccgaatggggaaacccagtgtgtttcgacacactatcattaactgaatccataggttaatgaggcgaaccgggggaactgaaacatctaagtaccccgaggaaaagaaatcaaccgagattcccccagtagcggcgagcgaacggggaggagcccagagcctgaatcagtgtgtgtgttagtggaagcgtctggaaaggcgcgcgatacagggtgacagccccgtacacaaaaatacacatattgtgagctcgatgagtagggcgggacacgtggtatcctgtctgaatatggggggaccatcctccaaggctaaatactcctgactgaccgatagtgaaccagtaccgtgagggaaaggcgaaaagaaccccggcgaggggagtgaaaaagaacctgaaaccgtgtacgtacaagcagtgggagcacgcttaggcgtgtgactgcgtaccttttgtataatgggtcagcgacttatattctgtagcaaggttaaccgaataggggagccgaagggaaaccgagtcttaactgggcgttaagttgcagggtatagacccgaaacccggtgatctagccatgggcaggttgaaggttgggtaacactaactggaggaccgaaccgactaatgttgaaaaattagcggatgacttgtggctgggggtgaaaggccaatcaaaccgggagatagctggttctccccgaaagctatttaggtagcgcctcgtgaattcatctccgggggtagagcactgtttcggcaagggggtcatcccgacttaccaacccgatgcaaactgcgaataccggagaatgttatcacgggagacacacggcgggtgctaacgtccgtcgtgaagagggaaacaacccagaccgccagctaaggtcccaaagtcatggttaagtgggaaacgatgtgggaaggcccagacagccaggatgttggcttagaagcagccatcatttaaagaaagcgtaatagctcactggtcgagtcggcctgcgcggaagatgtaacggggctaaaccatgcaccgaagctgcggcagcgacgcttatgcgttgttgggtaggggagcgttctgtaagcctgcgaaggtgtgctgtgaggcatgctggaggtatcagaagtgcgaatgctgacataagtaacgataaagcgggtgaaaagcccgctcgccggaagaccaagggttcctgtccaacgttaatcggggcagggtgagtcgacccctaagacgaggccgaaaggcgtagtcgatgggaaacaggttaatattcctgtacttggtgttactgcgaaggggggacggagaaggctatgttggccgggcgacggttgtcccggtttaagcgtgtaggctggttttccaggcaaatccggaaaatcaaggctgaggcgtgatgacgaggcactacggtgctgaagcaacaaatgccctgcttccaggaaaagcctctaagcatcaggtaacatcaaatcgtaccccaaaccgacacaggtggtcaggtagagaataccaaggcgcttgagagaactcgggtgaaggaactaggcaaaatggtgccgtaacttcgggagaaggcacgctgatatgtaggtgaagtcccttgcggatggagctgaaatcagtcgaagataccagctggctgcaactgtttattaaaaacacagcactgtgcaaacacgaaagtggacgtatacggtgtgacgcctgcccggtgccggaaggttaattgatggggtcagcgcaagcgaagctcttgatcgaagccccggtaaacggcggccgtaactataacggtcctaaggtagcgaaattccttgtcgggtaagttccgacctgcacgaatggcgtaatgatggccaggctgtctccacccgagactcagtgaaattgaactcgctgtgaagatgcagtgtacccgcggcaagacggaaagaccccgtgaacctttactatagcttgacactgaacattgagccttgatgtgtaggataggtgggaggctttgaagtgtggacgccagtctgcatggagccggccttgaaataccaccctttaatgtttgatgttctaacgtggacccgtgatccgggttgcggacagtgtctggtgggtagtttgactggggcggtctcctcctaaagagtaacggaggagcacgaaggttggctaatcctggtcggacatcaggaggttagtgcaatggcataagccagcttgactgcgagcgtgacggcgcgagcaggtgcgaaagcaggtcatagtgatccggtggttctgaatggaagggccatcgctcaacggataaaaggtactccggggataacaggctgataccgcccaagagttcatatcgacggcggtgtttggcacctcgatgtcggctcatcacatcctggggctgaagtaggtcccaagggtatggctgttcgccatttaaagtggtacgcgagctgggtttagaacgtcgtgagacagttcggtccctatctgccgtgggcgctggagaactgaggggggctgctcctagtacgagaggaccggagtggacgcatcactggtgttcgggttgtcatgccaatggcactgcccggtagctaaatgcggaagagataagtgctgaaagcatctaagcacgaaacttgccccgagatgagttctccctgaccctttaagggtcctgaaggaacgttgaagacgacgacgttgataggccgggtgtgtaagcgcagcgatgcgttgagctaaccggtactaatgaaccgtgaggcttaaccttacaacgccgaagctgttttggcggatgagagaagattttcagcctgatacagattaaatcagaacgcagaagcggtctgataaaacagaattgcctggcggccgtagcgcggtggtcccacctgaccccatgccgaactcagaagtgaaacgccgtagcgccgatggtagtgtggggtctccccatgcgagagtagggaactgccaggcatcaaataaaacgaaaggctcagtcgaaagactgggcctttcgttttatctgttgtttgtcggtgaacgctctcctgagtaggacaaatccgccgggagcggatttgaacgttgcgaagcaacggcccggagggtggcgggcaggacgcccgccataaactgccaggcatcaaattaagcagaaggccatcctgacggatggcctttttgcgtttctacaaactcttcctgtcgtcatatctacaagccggcgcgccgggaaatgtgcgcggaacccctatttgtttatttttctaaatacattcaaatatgtatccgctcatgagacaataaccctgataaatgcttcaataatattgaaaaaggaagagtatgagtattcaacatttccgtgtcgcccttattcccttttttgcggcattttgccttcctgtttttgctcacccagaaacgctggtgaaagtaaaagatgctgaagatcagttgggtgcacgagtgggttacatcgaactggatctcaacagcggtaagatccttgagagttttcgccccgaagaacgttttccaatgatgagcacttttaaagttctgctatgtggcgcggtattatcccgtgttgacgccgggcaagagcaactcggtcgccgcatacactattctcagaatgacttggttgagtactcaccagtcacagaaaagcatcttacggatggcatgacagtaagagaattatgcagtgctgcaataaccatgagtgataacactgcggccaacttacttctgacaacgatcggaggaccgaaggagctaaccgcttttttgcacaacatgggggatcatgtaactcgccttgatcgttgggaaccggagctgaatgaagccataccaaacgacgagcgtgacaccacgatgcctgcagcaatggcaacaacgttgcgcaaactattaactggcgaactacttactctagcttcccggcaacaattaatagactggatggaggcggataaagttgcaggaccacttctgcgctcggcccttccggctagctggtttattgctgataaatctggagccggtgagcgtgggtctcgcggtatcattgcagcactggggccagatggtaagccctcccgtatcgtagttatctacacgacggggagtcaggcaactatggatgaacgaaatagacagatcgctgagataggtgcctcactgattaagcattggtaactgcagaccaagtttactcatatatactttagattgatttaaaacttcatttttaatttaaaaggatctaggtgaagatcctttttgataatctcatgaccaaaatcccttaacgtgagttttcgttccactgagcgtcagaccccgtagaaaagatcaaaggatcttcttgagatcctttttttctgcgcgtaatctgctgcttgcaaacaaaaaaaccaccgctaccagcggtggtttgtttgccggatcaagagctaccaactctttttccgaaggtaactggcttcagcagagcgcagataccaaatactgtccttctagtgtagccgtagttaggccaccacttcaagaactctgtagcaccgcctacatacctcgctctgctaatcctgttaccagtggctgctgccagtggcgataagtcgtgtcttaccgggttggactcaagacgatagttaccggataaggcgcagcggtcgggctgaacggggggttcgtgcacacagcccagcttggagcgaacgacctacaccgaactgagatacctacagcgtgagctatgagaaagcgccacgcttcccgaagggagaaaggcggacaggtatccggtaagcggcagggtcggaacaggagagcgcacgagggagcttccagggggaaacgcctggtatctttatagtcctgtcgggtttcgccacctctgacttgagcgtcgatttttgtgatgctcgtcaggggggcggagcctatggaaaaacgccagcaacgcggcctttttacggttcctggccttttgctgg

SEQ ID NO: 28 - DNA, 7324 bp, Artificial
  Synthetic
agacttagggaccctgcggccgccattaattcctaatttttgttgacactctatcattgatagagttattttaccactccctatcagtgatagagaaaagtgaaatgaatagaccggccgctgagaaaaagcgaagcggctctttaacaatttatcagacaatctgtgtgggcactcgaagatacggattcttaacgtcgcaagacgaaaaatgaataccaagtctcaagagtgaacacgtaattcattacgaagtttaattctttgagcatcaaacttttaaattgaagagtttgatcatggctcagattgaacgctggcggcaggcctaacacatgcaagtcgaacggtaacaggaaacagcttgctgtttcgctgacgagtggcggacgggtgagtaatgtctgggaaactgcctgatggagggggataactactggaaacggtagctaataccgcataacgtcgcaagaccaaagagggggaccttcgggcctcttgccatcggatgtgcccagatgggattagctagtaggtggggtaacggctcacctaggcgacgatccctagctggtctgagaggatgaccagccacactggaactgagacacggtccagactcctacgggaggcagcagtggggaatattgcacaatgggcgcaagcctgatgcagccatgccgcgtgtatgaagaaggccttcgggttgtaaagtactttcagcggggaggaagggagtaaagttaatacctttgctcattgacgttacccgcagaagaagcaccggctaactccgtgccagcagccgcggtaatacggagggtgcaagcgttaatcggaattactgggcgtaaagcgcacgcaggcggtttgttaagtcagatgtgaaatccccgggctcaacctgggaactgcatctgatactggcaagcttgagtctcgtagaggggggtagaattccaggtgtagcggtgaaatgcgtagagatctggaggaatatcggtggcgaaggcggccccctggacgaagactgacgctcaggtgcgaaagcgtggggagcaaacaggattagataccctggtagtccacgccgtaaacgatgtcgacttggaggttgtgcccttgaggcgtggcttccggagctaacgcgttaagtcgaccgcctggggagtacggccgcaaggttaaaactcaaatgaattgacgggggcccgcacaagcggtggagcatgtggtttaattcgatgcaacgcgaagaaccttacctggtcttgacatccacggaagttttcagagatgagaatgtgccttcgggaaccgtgagacaggtgctgcatggctgtcgtcagctcgtgttgtgaaatgttgggttaagtcccgcaacgagcgcaacccttatcctttgttgccagcggtccggccgggaactcaaaggagactgccagtgataaactggaggaaggtggggatgacgtcaagtcatcatggcccttacgaccagggctacacacgtgctacaatggcgcatacaaagagaagcgacctcgcgagagcaagcggacctcataaagtgcgtcgtagtccggattggagtctgcaactcgactccatgaagtcggaatcgctagtaatcgtggatcagaatgccacggtgaatacgttcccgggccttgtacacaccgcccgtcacaccatgggagtgggttgcaaaagaagtaggtagcttaaccttcgggagggcgcttaccactttgtgattcatgactggggtgaagtcgtaacaaggtaaccgtaggggaacctgcggttggatcatgtggttaccttaaagaagcgtactttgcagtgctcacacagattgtctgatagaaagtgaaaagcaaggcgtcttgcgaagcagactgatacgtccccttcgtctagaggcccaggacaccgccctttcacggcggtaacaggggttcgaatcccctaggggacgccacttgctggtttgtgagtgaaagtcacctgccttaatatctcaaaactcatcttcgggtgatgtttgagatatttgctctttaaaaatctggatcaagctgaaaattgaaacactgaacaacgaaagttgttcgtgagtctctcgaattttcgcaacacgatgatgaatcgaaagaaacatcttcgggttgtgaggttaagcgactaagcgtacacggtggatgccctggcagtcagaggcgatgaaggacgtgctaatctgcgataagcgtcggtaaggtgatatgaaccgttataaccggcgatttccgaatggggaaacccagtgtgtttcgacacactatcattaactgaatccataggttaatgaggcgaaccgggggaactgaaacatctaagtaccccgaggaaaagaaatcaaccgagattcccccagtagcggcgagcgaacggggaggagcccagagcctgaatcagtgtgtgtgttagtggaagcgtctggaaaggcgcgcgatacagggtgacagccccgtacacaaaaatacacatattgtgagctcgatgagtagggcgggacacgtggtatcctgtctgaatatggggggaccatcctccaaggctaaatactcctgactgaccgatagtgaaccagtaccgtgagggaaaggcgaaaagaaccccggcgaggggagtgaaaaagaacctgaaaccgtgtacgtacaagcagtgggagcacgcttaggcgtgtgactgcgtaccttttgtataatgggtcagcgacttatattctgtagcaaggttaaccgaataggggagccgaagggaaaccgagtcttaactgggcgttaagttgcagggtatagacccgaaacccggtgatctagccatgggcaggttgaaggttgggtaacactaactggaggaccgaaccgactaatgttgaaaaattagcggatgacttgtggctgggggtgaaaggccaatcaaaccgggagatagctggttctccccgaaagctatttaggtagcgcctcgtgaattcatctccgggggtagagcactgtttcggcaagggggtcatcccgacttaccaacccgatgcaaactgcgaataccggagaatgttatcacgggagacacacggcgggtgctaacgtccgtcgtgaagagggaaacaacccagaccgccagctaaggtcccaaagtcatggttaagtgggaaacgatgtgggaaggcccagacagccaggatgttggcttagaagcagccatcatttaaagaaagcgtaatagctcactggtcgagtcggcctgcgcggaagatgtaacggggctaaaccatgcaccgaagctgcggcagcgacgcttatgcgttgttgggtaggggagcgttctgtaagcctgcgaaggtgtgctgtgaggcatgctggaggtatcagaagtgcgaatgctgacataagtaacgataaagcgggtgaaaagcccgctcgccggaagaccaagggttcctgtccaacgttaatcggggcagggtgagtcgacccctaagacgaggccgaaaggcgtagtcgatgggaaacaggttaatattcctgtacttggtgttactgcgaaggggggacggagaaggctatgttggccgggcgacggttgtcccggtttaagcgtgtaggctggttttccaggcaaatccggaaaatcaaggctgaggcgtgatgacgaggcactacggtgctgaagcaacaaatgccctgcttccaggaaaagcctctaagcatcaggtaacatcaaatcgtaccccaaaccgacacaggtggtcaggtagagaataccaaggcgcttgagagaactcgggtgaaggaactaggcaaaatggtgccgtaacttcgggagaaggcacgctgatatgtaggtgaagtcccttgcggatggagctgaaatcagtcgaagataccagctggctgcaactgtttattaaaaacacagcactgtgcaaacacgaaagtggacgtatacggtgtgacgcctgcccggtgccggaaggttaattgatggggtcagcgcaagcgaagctcttgatcgaagccccggtaaacggcggccgtaactataacggtcctaaggtagcgaaattccttgtcgggtaagttccgacctgcacgaatggcgtaatgatggccaggctgtctccacccgagactcagtgaaattgaactcgctgtgaagatgcagtgtacccgcggcaagacggaaagaccccgtgaacctttactatagcttgacactgaacattgagccttgatgtgtaggataggtgggaggctttgaagtgtggacgccagtctgcatggagccggccttgaaataccaccctttaatgtttgatgttctaacgtggacccgtgatccgggttgcggacagtgtctggtgggtagtttgactggggcggtctcctcctaaagagtaacggaggagcacgaaggttggctaatcctggtcggacatcaggaggttagtgcaatggcataagccagcttgactgcgagcgtgacggcgcgagcaggtgcgaaagcaggtcatagtgatccggtggttctgaatggaagggccatcgctcaacggataaaaggtactccggggataacaggctgataccgcccaagagttcatatcgacggcggtgtttggcacctcgatgtcggctcatcacatcctggggctgaagtaggtcccaagggtatggctgttcgccatttaaagtggtacgcgagctgggtttagaacgtcgtgagacagttcggtccctatctgccgtgggcgctggagaactgaggggggctgctcctagtacgagaggaccggagtggacgcatcactggtgttcgggttgtcatgccaatggcactgcccggtagctaaatgcggaagagataagtgctgaaagcatctaagcacgaaacttgccccgagatgagttctccctgaccctttaagggtcctgaaggaacgttgaagacgacgacgttgataggccgggtgtgtaagcgcagcgatgcgttgagctaaccggtactaatgaaccgtgaggcttaaccttacaacgccgaaggtgttttggcggatgagagaagattttcagcctgatacagattaaatcagaacgcagaagcggtctgataaaacagaatttgcctggcggccgtagcgcggtggtcccacctgaccccatgccgaactcagaagtgaaacgccgtagcgccgatggtagtgtggggtctccccatgcgagagtagggaactgccaggcatcaaattaagcagtaagccggtcataaaaccggtggttgtaaaagaattcggtggagcggtagttcagtcggttagaatacctgcctgtcacgcagggggtcgcgggttcgagtcccgtccgttccgccaccctaattaggggcgtagttcaattggtagagcaccggtctccaaaaccgggtgttgggagttcgagtctctccgcccctgccagaaatcatccttagcgaaagctaaggatttttgcgcgccgggaaatgtgcgcggaacccctatttgtttatttttctaaatacattcaaatatgtatccgctcatgagacaataaccctgataaatgcttcaataatattgaaaaaggaagagtatgagtattcaacatttccgtgtcgcccttattcccttttttgcggcattttgccttcctgtttttgctcacccagaaacgctggtgaaagtaaaagatgctgaagatcagttgggtgcacgagtgggttacatcgaactggatctcaacagcggtaagatccttgagagttttcgccccgaagaacgttttccaatgatgagcacttttaaagttctgctatgtggcgcggtattatcccgtgttgacgccgggcaagagcaactcggtcgccgcatacactattctcagaatgacttggttgagtactcaccagtcacagaaaagcatcttacggatggcatgacagtaagagaattatgcagtgctgcaataaccatgagtgataacactgcggccaacttacttctgacaacgatcggaggaccgaaggagctaaccgcttttttgcacaacatgggggatcatgtaactcgccttgatcgttgggaaccggagctgaatgaagccataccaaacgacgagcgtgacaccacgatgcctgcagcaatggcaacaacgttgcgcaaactattaactggcgaactacttactctagcttcccggcaacaattaatagactggatggaggcggataaagttgcaggaccacttctgcgctcggcccttccggctagctggtttattgctgataaatctggagccggtgagcgtgggtctcgcggtatcattgcagcactggggccagatggtaagccctcccgtatcgtagttatctacacgacggggagtcaggcaactatggatgaacgaaatagacagatcgctgagataggtgcctcactgattaagcattggtaactgcagaccaagtttactcatatatactttagattgatttaaaacttcatttttaatttaaaaggatctaggtgaagatcctttttgataatctcatgaccaaaatcccttaacgtgagttttcgttccactgagcgtcagaccccgtagaaaagatcaaaggatcttcttgagatcctttttttctgcgcgtaatctgctgcttgcaaacaaaaaaaccaccgctaccagcggtggtttgtttgccggatcaagagctaccaactctttttccgaaggtaactggcttcagcagagcgcagataccaaatactgtccttctagtgtagccgtagttaggccaccacttcaagaactctgtagcaccgcctacatacctcgctctgctaatcctgttaccagtggctgctgccagtggcgataagtcgtgtcttaccgggttggactcaagacgatagttaccggataaggcgcagcggtcgggctgaacggggggttcgtgcacacagcccagcttggagcgaacgacctacaccgaactgagatacctacagcgtgagctatgagaaagcgccacgcttcccgaagggagaaaggcggacaggtatccggtaagcggcagggtcggaacaggagagcgcacgagggagcttccagggggaaacgcctggtatctttatagtcctgtcgggtttcgccacctctgacttgagcgtcgatttttgtgatgctcgtcaggggggcggagcctatggaaaaacgccagcaacgcggcctttttacggttcctggccttttgctgg

SEQ ID NO: 29 - DNA, 7417 bp, Artificial
  Synthetic
agacttagggaccctgcggccgccattaattcctaatttttgttgacactctatcattgatagagttattttaccactccctatcagtgatagagaaaagtgaaatgaatagaccggccgctgagaaaaagcgaagcggcactgctctttaacaatttatcagacaatctgtgtgggcactcgaagatacggattcttaacgtcgcaagacgaaaaatgaataccaagtctcaagagtgaacacgtaattcattacgaagtttaattctttgagcgtcaaacttttaaattgaagagtttgatcatggctcagattgaacgctggcggcaggcctaacacatgcaagtcgaacggtaacaggaaacagcttgctgtttcgctgacgagtggcggacgggtgagtaatgtctgggaaactgcctgatggagggggataactactggaaacggtagctaataccgcataacgtcgcaagaccaaagagggggaccttcgggcctcttgccatcggatgtgcccagatgggattagctagtaggtggggtaacggctcacctaggcgacgatccctagctggtctgagaggatgaccagccacactggaactgagacacggtccagactcctacgggaggcagcagtggggaatattgcacaatgggcgcaagcctgatgcagccatgccgcgtgtatgaagaaggccttcgggttgtaaagtactttcagcggggaggaagggagtaaagttaatacctttgctcattgacgttacccgcagaagaagcaccggctaactccgtgccagcagccgcggtaatacggagggtgcaagcgttaatcggaattactgggcgtaaagcgcacgcaggcggtttgttaagtcagatgtgaaatccccgggctcaacctgggaactgcatctgatactggcaagcttgagtctcgtagaggggggtagaattccaggtgtagcggtgaaatgcgtagagatctggaggaatatcggtggcgaaggcggccccctggacgaagactgacgctcaggtgcgaaagcgtggggagcaaacaggattagataccctggtagtccacgccgtaaacgatgtcgacttggaggttgtgcccttgaggcgtggcttccggagctaacgcgttaagtcgaccgcctggggagtacggccgcaaggttaaaactcaaatgaattgacgggggcccgcacaagcggtggagcatgtggtttaattcgatgcaacgcgaagaaccttacctggtcttgacatccacggaagttttcagagatgagaatgtgccttcgggaaccgtgagacaggtgctgcatggctgtcgtcagctcgtgttgtgaaatgttgggttaagtcccgcaacgagcgcaacccttatcctttgttgccagcggtccggccgggaactcaaaggagactgccagtgataaactggaggaaggtggggatgacgtcaagtcatcatggcccttacgaccagggctacacacgtgctacaatggcgcatacaaagagaagcgacctcgcgagagcaagcggacctcataaagtgcgtcgtagtccggattggagtctgcaactcgactccatgaagtcggaatcgctagtaatcgtggatcagaatgccacggtgaatacgttcccgggccttgtacacaccgcccgtcacaccatgggagtgggttgcaaaagaagtaggtagcttaaccttcgggagggcgcttaccactttgtgattcatgactggggtgaagtcgtaacaaggtaaccgtaggggaacctgcggttggatcatgtggttaccttaaagaagcgtactttgtagtgctcacacagattgtctgatagaaagtgaaaagcaaggcgtttacgcgttgggagtgaggctgaagagaataaggccgttcgctttctattaatgaaagctcaccctacacgaaaatatcacgcaacgcgtgataagcaattttcgtgtccccttcgtctagaggcccaggacaccgccctttcacggcggtaacaggggttcgaatcccctaggggacgccacttgctggtttgtgagtgaaagtcgccgaccttaatatctcaaaactcatcttcgggtgatgtttgagatatttgctctttaaaaatctggatcaagctgaaaattgaaacactgaacaacgagagttgttcgtgagtctctcaaattttcgcaacacgatgatgaatcgaaagaaacatcttcgggttgtgaggttaagcgactaagcgtacacggtggatgccctggcagtcagaggcgatgaaggacgtgctaatctgcgataagcgtcggtaaggtgatatgaaccgttataaccggcgatttccgaatggggaaacccagtgtgtttcgacacactatcattaactgaatccataggttaatgaggcgaaccgggggaactgaaacatctaagtaccccgaggaaaagaaatcaaccgagattcccccagtagcggcgagcgaacggggaggagcccagagcctgaatcagtgtgtgtgttagtggaagcgtctggaaaggcgcgcgatacagggtgacagccccgtacacaaaaatacacatattgtgagctcgatgagtagggcgggacacgtggtatcctgtctgaatatggggggaccatcctccaaggctaaatactcctgactgaccgatagtgaaccagtaccgtgagggaaaggcgaaaagaaccccggcgaggggagtgaaaaagaacctgaaaccgtgtacgtacaagcagtgggagcacgcttaggcgtgtgactgcgtaccttttgtataatgggtcagcgacttatattctgtagcaaggttaaccgaataggggagccgaagggaaaccgagtcttaactgggcgttaagttgcagggtatagacccgaaacccggtgatctagccatgggcaggttgaaggttgggtaacactaactggaggaccgaaccgactaatgttgaaaaattagcggatgacttgtggctgggggtgaaaggccaatcaaaccgggagatagctggttctccccgaaagctatttaggtagcgcctcgtgaattcatctccgggggtagagcactgtttcggcaagggggtcatcccgacttaccaacccgatgcaaactgcgaataccggagaatgttatcacgggagacacacggcgggtgctaacgtccgtcgtgaagagggaaacaacccagaccgccagctaaggtcccaaagtcatggttaagtgggaaacgatgtgggaaggcccagacagccaggatgttggcttagaagcagccatcatttaaagaaagcgtaatagctcactggtcgagtcggcctgcgcggaagatgtaacggggctaaaccatgcaccgaagctgcggcagcgacgcttatgcgttgttgggtaggggagcgttctgtaagcctgcgaaggtgtgctgtgaggcatgctggaggtatcagaagtgcgaatgctgacataagtaacgataaagcgggtgaaaagcccgctcgccggaagaccaagggttcctgtccaacgttaatcggggcagggtgagtcgacccctaagacgaggccgaaaggcgtagtcgatgggaaacaggttaatattcctgtacttggtgttactgcgaaggggggacggagaaggctatgttggccgggcgacggttgtcccggtttaagcgtgtaggctggttttccaggcaaatccggaaaatcaaggctgaggcgtgatgacgaggcactacggtgctgaagcaacaaatgccctgcttccaggaaaagcctctaagcatcaggtaacatcaaatcgtaccccaaaccgacacaggtggtcaggtagagaataccaaggcgcttgagagaactcgggtgaaggaactaggcaaaatggtgccgtaacttcgggagaaggcacgctgatatgtaggtgaagtcccttgcggatggagctgaaatcagtcgaagataccagctggctgcaactgtttattaaaaacacagcactgtgcaaacacgaaagtggacgtatacggtgtgacgcctgcccggtgccggaaggttaattgatggggtcagcgcaagcgaagctcttgatcgaagccccggtaaacggcggccgtaactataacggtcctaaggtagcgaaattccttgtcgggtaagttccgacctgcacgaatggcgtaatgatggccaggctgtctccacccgagactcagtgaaattgaactcgctgtgaagatgcagtgtacccgcggcaagacggaaagaccccgtgaacctttactatagcttgacactgaacattgagccttgatgtgtaggataggtgggaggctttgaagtgtggacgccagtctgcatggagccggccttgaaataccaccctttaatgtttgatgttctaacgtggacccgtgatccgggttgcggacagtgtctggtgggtagtttgactggggcggtctcctcctaaagagtaacggaggagcacgaaggttggctaatcctggtcggacatcaggaggttagtgcaatggcataagccagcttgactgcgagcgtgacggcgcgagcaggtgcgaaagcaggtcatagtgatccggtggttctgaatggaagggccatcgctcaacggataaaaggtactccggggataacaggctgataccgcccaagagttcatatcgacggcggtgtttggcacctcgatgtcggctcatcacatcctggggctgaagtaggtcccaagggtatggctgttcgccatttaaagtggtacgcgagctgggtttagaacgtcgtgagacagttcggtccctatctgccgtgggcgctggagaactgaggggggctgctcctagtacgagaggaccggagtggacgcatcactggtgttcgggttgtcatgccaatggcactgcccggtagctaaatgcggaagagataagtgctgaaagcatctaagcacgaaacttgccccgagatgagttctccctgaccctttaagggtcctgaaggaacgttgaagacgacgacgttgataggccgggtgtgtaagcgcagcgatgcgttgagctaaccggtactaatgaaccgtgaggcttaaccttacaacgccgaagctgttttggcggatgagagaagattttcagcctgatacagattaaatcagaacgcagaagcggtctgataaaacagaattgcctggcggccgtagcgcggtggtcccacctgaccccatgccgaactcagaagtgaaacgccgtagcgccgatggtagtgtggggtctccccatgcgagagtagggaactgccaggcatcaaataaaacgaaaggctcagtcgaaagactgggcctttcgttttatctgttgtttgtcggtgaacgctctcctgagtaggacaaatccgccgggagcggatttgaacgttgcgaagcaacggcccggagggtggcgggcaggacgcccgccataaactgccaggcatcaaattaagcagaaggccatcctgacggatggcctttttgcgtttctacaaactcttcctgtcgtcatatctacaagccggcgcgccgggaaatgtgcgcggaacccctatttgtttatttttctaaatacattcaaatatgtatccgctcatgagacaataaccctgataaatgcttcaataatattgaaaaaggaagagtatgagtattcaacatttccgtgtcgcccttattcccttttttgcggcattttgccttcctgtttttgctcacccagaaacgctggtgaaagtaaaagatgctgaagatcagttgggtgcacgagtgggttacatcgaactggatctcaacagcggtaagatccttgagagttttcgccccgaagaacgttttccaatgatgagcacttttaaagttctgctatgtggcgcggtattatcccgtgttgacgccgggcaagagcaactcggtcgccgcatacactattctcagaatgacttggttgagtactcaccagtcacagaaaagcatcttacggatggcatgacagtaagagaattatgcagtgctgcaataaccatgagtgataacactgcggccaacttacttctgacaacgatcggaggaccgaaggagctaaccgcttttttgcacaacatgggggatcatgtaactcgccttgatcgttgggaaccggagctgaatgaagccataccaaacgacgagcgtgacaccacgatgcctgcagcaatggcaacaacgttgcgcaaactattaactggcgaactacttactctagcttcccggcaacaattaatagactggatggaggcggataaagttgcaggaccacttctgcgctcggcccttccggctagctggtttattgctgataaatctggagccggtgagcgtgggtctcgcggtatcattgcagcactggggccagatggtaagccctcccgtatcgtagttatctacacgacggggagtcaggcaactatggatgaacgaaatagacagatcgctgagataggtgcctcactgattaagcattggtaactgcagaccaagtttactcatatatactttagattgatttaaaacttcatttttaatttaaaaggatctaggtgaagatcctttttgataatctcatgaccaaaatcccttaacgtgagttttcgttccactgagcgtcagaccccgtagaaaagatcaaaggatcttcttgagatcctttttttctgcgcgtaatctgctgcttgcaaacaaaaaaaccaccgctaccagcggtggtttgtttgccggatcaagagctaccaactctttttccgaaggtaactggcttcagcagagcgcagataccaaatactgtccttctagtgtagccgtagttaggccaccacttcaagaactctgtagcaccgcctacatacctcgctctgctaatcctgttaccagtggctgctgccagtggcgataagtcgtgtcttaccgggttggactcaagacgatagttaccggataaggcgcagcggtcgggctgaacggggggttcgtgcacacagcccagcttggagcgaacgacctacaccgaactgagatacctacagcgtgagctatgagaaagcgccacgcttcccgaagggagaaaggcggacaggtatccggtaagcggcagggtcggaacaggagagcgcacgagggagcttccagggggaaacgcctggtatctttatagtcctgtcgggtttcgccacctctgacttgagcgtcgatttttgtgatgctcgtcaggggggcggagcctatggaaaaacgccagcaacgcggcctttttacggttcctggccttttgctgg

SEQ ID NO: 30 - DNA, 7332 bp, Artificial
  Synthetic
agacttagggaccctgcggccgccattaattcctaatttttgttgacactctatcattgatagagttattttaccactccctatcagtgatagagaaaagtgaaatgaatagaccggccgctgagaaaaagcgaagcggcactgctctttaacaatttatcagacaatctgtgtgggcactcgaagatacggattcttaacgtcgcaagacgaaaaatgaataccaagtctcaagagtgaacacgtaattcattacgaagtttaattctttgagcatcaaacttttaaattgaagagtttgatcatggctcagattgaacgctggcggcaggcctaacacatgcaagtcgaacggtaacaggaagcagcttgctgtttcgctgacgagtggcggacgggtgagtaatgtctgggaaactgcctgatggagggggataactactggaaacggtagctaataccgcataacgtcgcaagaccaaagagggggaccttcgggcctcttgccatcggatgtgcccagatgggattagctagtaggtggggtaacggctcacctaggcgacgatccctagctggtctgagaggatgaccagccacactggaactgagacacggtccagactcctacgggaggcagcagtggggaatattgcacaatgggcgcaagcctgatgcagccatgccgcgtgtatgaagaaggccttcgggttgtaaagtactttcagcggggaggaagggagtaaagttaatacctttactcattgacgttacccgcagaagaagcaccggctaactccgtgccagcagccgcggtaatacggagggtgcaagcgttaatcggaattactgggcgtaaagcgcacgcaggcggtttgttaagtcagatgtgaaatccccgggctcaacctgggaactgcatctgatactggcaagcttgagtctcgtagaggggggtagaattccaggtgtagcggtgaaatgcgtagagatctggaggaataccggtggcgaaggcggccccctggacgaagactgacgctcaggtgcgaaagcgtggggagcaaacaggattagataccctggtagtccacgccgtaaacgatgtcgacttggaggttgtgcccttgaggtgtggcttccggagctaacgcgttaagtcgaccgcctggggagtacggccgcaaggttaaaactcaaatgaattgacgggggcccgcacaagcggtggagcatgtggtttaattcgatgcaacgcgaagaaccttacctggtcttgacatccacggaagttttcagagatgagaatgtgccttcgggaaccgtgagacaggtgctgcatggctgtcgtcagctcgtgttgtgaaatgttgggttaagtcccgcaacgagcgcaacccttatcctttgttgccagcggtccggccgggaactcaaaggagactgccagtgataaactggaggaaggtggggatgacgtcaagtcatcatggcccttacgaccagggctacacacgtgctacaatggcgcatacaaagagaagcgacctcgcgagagcaagcggacctcataaagtgcgtcgtagtccggattggagtctgcaactcgactccatgaagtcggaatcgctagtaatcgtggatcagaatgccacggtgaatacgttcccgggccttgtacacaccgcccgtcacaccatgggagtgggttgcaaaagaagtaggtagcttaaccttcgggagggcgcttaccactttgtgattcatgactggggtgaagtcgtaacaaggtaaccgtaggggaacctgcggttggatcacctccttaccttaaagaagcgttctttgtagtgctcacacagattgtctgatagaaagtgaaaagcaaggcgtcttgcgaagcagactgatacgtccccttcgtctagaggcccaggacaccgccctttcacggcggtaacaggggttcgaatcccctaggggacgccacttgctggtttgtgagtgaaagtcacctgccttgatatctcaaaactcatcttcgggtgatgtttgagatatttgctctttaaaaatctggatcaagctgaaaattgaaacactgaacaacgaaagttgttcgtgagtctctcaaattttcgcaacacgatgatgagtcgaaagaaacatcttcgggttgtgaggttaagcgactaagcgtacacggtggatgccctggcagtcagaggcgatgaaggacgtgctaatctgcgataagcgtcggtaaggtgatatgaaccgttataaccggcgatttccgaatggggaaacccagtgtgattcgtcacactatcattaactgaatccataggttaatgaggcgaaccgggggaactgaaacatctaagtaccccgaggaaaagaaatcaaccgagattcccccagtagcggcgagcgaacggggagcagcccagagcctgaatcagtgtgtgtgttagtggaagcgtctggaaaggcgtgcgatacagggtgacagccccgtacacaaaaatgcacatactgtgagctcgatgagtagggcgggacacgtggtatcctgtctgaatatggggggaccatcctccaaggctaaatactcctgactgaccgatagtgaaccagtaccgtgagggaaaggcgaaaagaaccccggcgaggggagtgaaaaagaacctgaaaccgtgtacgtacaagcagtgggagcacgcttaggcgtgtgactgcgtaccttttgtataatgggtcagcgacttatattctgtagcaaggttaaccgaataggggagccgaagggaaaccgagtcttaactgggcgttaagttgcagggtatagacccgaaacccggtgatctagccatgggcaggttgaaggttgggtaacactaactggaggaccgaaccgactaatgttgaaaaattagcggatgacttgtggctgggggtgaaaggccaatcaaaccgggagatagctggttctccccgaaagctatttaggtagcgcctcgtgaattcatctccgggggtagagcactgtttcggcaagggggtcatcccgacttaccaacccgatgcaaactgcgaataccggagaatgttatcacgggagacacacggcgggtgctaacgtccgtcgtgaagagggaaacaacccagaccgccagctaaggtcccaaagtcatggttaagtgggaaacgatgtgggaaggcccagacagccaggatgttggcttagaagcagccatcatttaaagaaagcgtaatagctcactggtcgagtcggcctgcgcggaagatgtaacggggctaaaccatgcaccgaagctgcggcagcgacgcttatgcgttgttgggtaggggagcgttctgtaagcctgtgaaggtgtgctgtgaggtatgctggaggtatcagaagtgcgaatgctgacataagtaacgataaagcgggtgaaaagcccgctcgccggaagaccaagggttcctgtccaacgttaatcggggcagggtgagtcgacccctaaggcgaggccgaaaggcgtagtcgatgggaaacaggttaatattcctgtacttggtgttactgcgaaggggggacggagaaggctatgttggccgggcgacggttgtcccggtttaagcgtgtaggctggttttccaggcaaatccggaaaatcaaggccgaggcgtgatgacgaggcactacggtgctgaagcaacaaatgccctgcttccaggaaaagcctctaagcatcaggtaacatcaaatcgtaccccaaaccgacacaggtggtcaggtagagaataccaaggcgcttgagagaactcgggtgaaggaactaggcaaaatggtgccgtaacttcgggagaaggcacgctgatacgtaggtgaagcgacttgctcgtggagctgaaatcagtcgaagataccagctggctgcaactgtttattaaaaacacagcactgtgcaaacacgaaagtggacgtatacggtgtgacgcctgcccggtgccggaaggttaattgatggggttagcgcaagcgaagctcttgatcgaagccccggtaaacggcggccgtaactataacggtcctaaggtagcgaaattccttgtcgggtaagttccgacctgcacgaatggcgtaatgatggccaggctgtctccacccgagactcagtgaaattgaactcgctgtgaagatgcagtgtacccgcggcaagacggaaagaccccgtgaacctttactatagcttgacactgaacattgagccttgatgtgtaggataggtgggaggctttgaagtgtggacgccagtctgcatggagccgaccttgaaataccaccctttaatgtttgatgttctaacgtggacccgtgatccgggttgcggacagtgtctggtgggtagtttgactggggcggtctcctcctaaagagtaacggaggagcacgaaggttggctaatcctggtcggacatcaggaggttagtgcaatggcataagccagcttgactgcgagcgtgacggcgcgagcaggtgcgaaagcaggtcatagtgatccggtggttctgaatggaagggccatcgctcaacggataaaaggtactccggggataacaggctgataccgcccaagagttcatatcgacggcggtgtttggcacctcgatgtcggctcatcacatcctggggctgaagtaggtcccaagggtatggctgttcgccatttaaagtggtacgcgagctgggtttagaacgtcgtgagacagttcggtccctatctgccgtgggcgctggagaactgaggggggctgctcctagtacgagaggaccggagtggacgcatcactggtgttcgggttgtcatgccaatggcactgcccggtagctaaatgcggaagagataagtgctgaaagcatctaagcacgaaacttgccccgagatgagttctccctgaccctttaagggtcctgaaggaacgttgaagacgacgacgttgataggccgggtgtgtaagcgcagcgatgcgttgagctaaccggtactaatgaaccgtgaggcttaaccttacaacgccgaagatgttttggcggattgagagaagattttcagcctgatacagattaaatcagaacgcagaagcggtctgataaaacagaattagcctggcggccgtagcgcggtggtcccacctgaccccatgccgaactcagaagtgaaacgccgtagcgccgatggtagtgtggggtctccccatgcgagagtagggaactgccaggcatcaaattaagcagtaagccggtcgtaaaaccggtggttgtaaaagaattcggtggagcggtagttcagtcggttagaatacctgcctgtcacgcagggggtcgcgggttcgagtcccgtccgttccgccaccctaattaggggcgtagttcaattggtagagcaccggtctccaaaaccgggtgttgggagttcgagtctctccgcccctgccagaaatcatccttagcgaaagctaaggatttttttgcgcgccgggaaatgtgcgcggaacccctatttgtttatttttctaaatacattcaaatatgtatccgctcatgagacaataaccctgataaatgcttcaataatattgaaaaaggaagagtatgagtattcaacatttccgtgtcgcccttattcccttttttgcggcattttgccttcctgtttttgctcacccagaaacgctggtgaaagtaaaagatgctgaagatcagttgggtgcacgagtgggttacatcgaactggatctcaacagcggtaagatccttgagagttttcgccccgaagaacgttttccaatgatgagcacttttaaagttctgctatgtggcgcggtattatcccgtgttgacgccgggcaagagcaactcggtcgccgcatacactattctcagaatgacttggttgagtactcaccagtcacagaaaagcatcttacggatggcatgacagtaagagaattatgcagtgctgcaataaccatgagtgataacactgcggccaacttacttctgacaacgatcggaggaccgaaggagctaaccgcttttttgcacaacatgggggatcatgtaactcgccttgatcgttgggaaccggagctgaatgaagccataccaaacgacgagcgtgacaccacgatgcctgcagcaatggcaacaacgttgcgcaaactattaactggcgaactacttactctagcttcccggcaacaattaatagactggatggaggcggataaagttgcaggaccacttctgcgctcggcccttccggctagctggtttattgctgataaatctggagccggtgagcgtgggtctcgcggtatcattgcagcactggggccagatggtaagccctcccgtatcgtagttatctacacgacggggagtcaggcaactatggatgaacgaaatagacagatcgctgagataggtgcctcactgattaagcattggtaactgcagaccaagtttactcatatatactttagattgatttaaaacttcatttttaatttaaaaggatctaggtgaagatcctttttgataatctcatgaccaaaatcccttaacgtgagttttcgttccactgagcgtcagaccccgtagaaaagatcaaaggatcttcttgagatcctttttttctgcgcgtaatctgctgcttgcaaacaaaaaaaccaccgctaccagcggtggtttgtttgccggatcaagagctaccaactctttttccgaaggtaactggcttcagcagagcgcagataccaaatactgtccttctagtgtagccgtagttaggccaccacttcaagaactctgtagcaccgcctacatacctcgctctgctaatcctgttaccagtggctgctgccagtggcgataagtcgtgtcttaccgggttggactcaagacgatagttaccggataaggcgcagcggtcgggctgaacggggggttcgtgcacacagcccagcttggagcgaacgacctacaccgaactgagatacctacagcgtgagctatgagaaagcgccacgcttcccgaagggagaaaggcggacaggtatccggtaagcggcagggtcggaacaggagagcgcacgagggagcttccagggggaaacgcctggtatctttatagtcctgtcgggtttcgccacctctgacttgagcgtcgatttttgtgatgctcgtcaggggggcggagcctatggaaaaacgccagcaacgcggcctttttacggttcctggccttttgctgg

SEQ ID NO: 31 - DNA, 7417 bp, Artificial
  Synthetic
agacttagggaccctgcggccgccattaattcctaatttttgttgacactctatcattgatagagttattttaccactccctatcagtgatagagaaaagtgaaatgaatagaccggccgctgagaaaaagcgaagcggcactgctctttaacaatttatcagacaatctgtgtgggcactcgaagatacggattcttaacgtcgcaagacgaaaaatgaataccaagtctcaagagtgaacacgtaattcattacgaagtttaattctttgagcgtcaaacttttaaattgaagagtttgatcatggctcagattgaacgctggcggcaggcctaacacatgcaagtcgaacggtaacaggaagcagcttgctgtttcgctgacgagtggcggacgggtgagtaatgtctgggaaactgcctgatggagggggataactactggaaacggtagctaataccgcataacgtcgcaagaccaaagagggggaccttcgggcctcttgccatcggatgtgcccagatgggattagctagtaggtggggtaacggctcacctaggcgacgatccctagctggtctgagaggatgaccagccacactggaactgagacacggtccagactcctacgggaggcagcagtggggaatattgcacaatgggcgcaagcctgatgcagccatgccgcgtgtatgaagaaggccttcgggttgtaaagtactttcagcggggaggaagggagtaaagttaatacctttactcattgacgttacccgcagaagaagcaccggctaactccgtgccagcagccgcggtaatacggagggtgcaagcgttaatcggaattactgggcgtaaagcgcacgcaggcggtttgttaagtcagatgtgaaatccccgggctcaacctgggaactgcatctgatactggcaagcttgagtctcgtagaggggggtagaattccaggtgtagcggtgaaatgcgtagagatctggaggaataccggtggcgaaggcggccccctggacgaagactgacgctcaggtgcgaaagcgtggggagcaaacaggattagataccctggtagtccacgccgtaaacgatgtcgacttggaggttgtgcccttgaggtgtggcttccggagctaacgcgttaagtcgaccgcctggggagtacggccgcaaggttaaaactcaaatgaattgacgggggcccgcacaagcggtggagcatgtggtttaattcgatgcaacgcgaagaaccttacctggtcttgacatccacggaagttttcagagatgagaatgtgccttcgggaaccgtgagacaggtgctgcatggctgtcgtcagctcgtgttgtgaaatgttgggttaagtcccgcaacgagcgcaacccttatcctttgttgccagcggtccggccgggaactcaaaggagactgccagtgataaactggaggaaggtggggatgacgtcaagtcatcatggcccttacgaccagggctacacacgtgctacaatggcgcatacaaagagaagcgacctcgcgagagcaagcggacctcataaagtgcgtcgtagtccggattggagtctgcaactcgactccatgaagtcggaatcgctagtaatcgtggatcagaatgccacggtgaatacgttcccgggccttgtacacaccgcccgtcacaccatgggagtgggttgcaaaagaagtaggtagcttaaccttcgggagggcgcttaccactttgtgattcatgactggggtgaagtcgtaacaaggtaaccgtaggggaacctgcggttggatcacctccttaccttaaagaagcgtactttgtagtgctcacacagattgtctgatagaaagtgaaaagcaaggcgtttacgcgttgggagtgaggctgaagagaataaggccgttcgctttctattaatgaaagctcaccctacacgaaaatatcacgcaacgcgtgataagcaattttcgtgtccccttcgtctagaggcccaggacaccgccctttcacggcggtaacaggggttcgaatcccctaggggacgccacttgctggtttgtgagtgaaagtcgccgaccttaatatctcaaaactcatcttcgggtgatgtttgagatatttgctctttaaaaatctggatcaagctgaaaattgaaacactgaacaacgagagttgttcgtgagtctctcaaattttcgcaacacgatgatgaatcgaaagaaacatcttcgggttgtgaggttaagcgactaagcgtacacggtggatgccctggcagtcagaggcgatgaaggacgtgctaatctgcgataagcgtcggtaaggtgatatgaaccgttataaccggcgatttccgaatggggaaacccagtgtgattcgtcacactatcattaactgaatccataggttaatgaggcgaaccgggggaactgaaacatctaagtaccccgaggaaaagaaatcaaccgagattcccccagtagcggcgagcgaacggggagcagcccagagcctgaatcagtgtgtgtgttagtggaagcgtctggaaaggcgtgcgatacagggtgacagccccgtacacaaaaatgcacatactgtgagctcgatgagtagggcgggacacgtggtatcctgtctgaatatggggggaccatcctccaaggctaaatactcctgactgaccgatagtgaaccagtaccgtgagggaaaggcgaaaagaaccccggcgaggggagtgaaaaagaacctgaaaccgtgtacgtacaagcagtgggagcacgcttaggcgtgtgactgcgtaccttttgtataatgggtcagcgacttatattctgtagcaaggttaaccgaataggggagccgaagggaaaccgagtcttaactgggcgttaagttgcagggtatagacccgaaacccggtgatctagccatgggcaggttgaaggttgggtaacactaactggaggaccgaaccgactaatgttgaaaaattagcggatgacttgtggctgggggtgaaaggccaatcaaaccgggagatagctggttctccccgaaagctatttaggtagcgcctcgtgaattcatctccgggggtagagcactgtttcggcaagggggtcatcccgacttaccaacccgatgcaaactgcgaataccggagaatgttatcacgggagacacacggcgggtgctaacgtccgtcgtgaagagggaaacaacccagaccgccagctaaggtcccaaagtcatggttaagtgggaaacgatgtgggaaggcccagacagccaggatgttggcttagaagcagccatcatttaaagaaagcgtaatagctcactggtcgagtcggcctgcgcggaagatgtaacggggctaaaccatgcaccgaagctgcggcagcgacgcttatgcgttgttgggtaggggagcgttctgtaagcctgtgaaggtgtgctgtgaggtatgctggaggtatcagaagtgcgaatgctgacataagtaacgataaagcgggtgaaaagcccgctcgccggaagaccaagggttcctgtccaacgttaatcggggcagggtgagtcgacccctaaggcgaggccgaaaggcgtagtcgatgggaaacaggttaatattcctgtacttggtgttactgcgaaggggggacggagaaggctatgttggccgggcgacggttgtcccggtttaagcgtgtaggctggttttccaggcaaatccggaaaatcaaggccgaggcgtgatgacgaggcactacggtgctgaagcaacaaatgccctgcttccaggaaaagcctctaagcatcaggtaacatcaaatcgtaccccaaaccgacacaggtggtcaggtagagaataccaaggcgcttgagagaactcgggtgaaggaactaggcaaaatggtgccgtaacttcgggagaaggcacgctgatacgtaggtgaagcgacttgctcgtggagctgaaatcagtcgaagataccagctggctgcaactgtttattaaaaacacagcactgtgcaaacacgaaagtggacgtatacggtgtgacgcctgcccggtgccggaaggttaattgatggggttagcgcaagcgaagctcttgatcgaagccccggtaaacggcggccgtaactataacggtcctaaggtagcgaaattccttgtcgggtaagttccgacctgcacgaatggcgtaatgatggccaggctgtctccacccgagactcagtgaaattgaactcgctgtgaagatgcagtgtacccgcggcaagacggaaagaccccgtgaacctttactatagcttgacactgaacattgagccttgatgtgtaggataggtgggaggctttgaagtgtggacgccagtctgcatggagccgaccttgaaataccaccctttaatgtttgatgttctaacgtggacccgtgatccgggttgcggacagtgtctggtgggtagtttgactggggcggtctcctcctaaagagtaacggaggagcacgaaggttggctaatcctggtcggacatcaggaggttagtgcaatggcataagccagcttgactgcgagcgtgacggcgcgagcaggtgcgaaagcaggtcatagtgatccggtggttctgaatggaagggccatcgctcaacggataaaaggtactccggggataacaggctgataccgcccaagagttcatatcgacggcggtgtttggcacctcgatgtcggctcatcacatcctggggctgaagtaggtcccaagggtatggctgttcgccatttaaagtggtacgcgagctgggtttagaacgtcgtgagacagttcggtccctatctgccgtgggcgctggagaactgaggggggctgctcctagtacgagaggaccggagtggacgcatcactggtgttcgggttgtcatgccaatggcactgcccggtagctaaatgcggaagagataagtgctgaaagcatctaagcacgaaacttgccccgagatgagttctccctgaccctttaagggtcctgaaggaacgttgaagacgacgacgttgataggccgggtgtgtaagcgcagcgatgcgttgagctaaccggtactaatgaaccgtgaggcttaaccttacaacgccgaagctgttttggcggatgagagaagattttcagcctgatacagattaaatcagaacgcagaagcggtctgataaaacagaattgcctggcggccgtagcgcggtggtcccacctgaccccatgccgaactcagaagtgaaacgccgtagcgccgatggtagtgtggggtctccccatgcgagagtagggaactgccaggcatcaaataaaacgaaaggctcagtcgaaagactgggcctttcgttttatctgttgtttgtcggtgaacgctctcctgagtaggacaaatccgccgggagcggatttgaacgttgcgaagcaacggcccggagggtggcgggcaggacgcccgccataaactgccaggcatcaaattaagcagaaggccatcctgacggatggcctttttgcgtttctacaaactcttcctgtcgtcatatctacaagccggcgcgccgggaaatgtgcgcggaacccctatttgtttatttttctaaatacattcaaatatgtatccgctcatgagacaataaccctgataaatgcttcaataatattgaaaaaggaagagtatgagtattcaacatttccgtgtcgcccttattcccttttttgcggcattttgccttcctgtttttgctcacccagaaacgctggtgaaagtaaaagatgctgaagatcagttgggtgcacgagtgggttacatcgaactggatctcaacagcggtaagatccttgagagttttcgccccgaagaacgttttccaatgatgagcacttttaaagttctgctatgtggcgcggtattatcccgtgttgacgccgggcaagagcaactcggtcgccgcatacactattctcagaatgacttggttgagtactcaccagtcacagaaaagcatcttacggatggcatgacagtaagagaattatgcagtgctgcaataaccatgagtgataacactgcggccaacttacttctgacaacgatcggaggaccgaaggagctaaccgcttttttgcacaacatgggggatcatgtaactcgccttgatcgttgggaaccggagctgaatgaagccataccaaacgacgagcgtgacaccacgatgcctgcagcaatggcaacaacgttgcgcaaactattaactggcgaactacttactctagcttcccggcaacaattaatagactggatggaggcggataaagttgcaggaccacttctgcgctcggcccttccggctagctggtttattgctgataaatctggagccggtgagcgtgggtctcgcggtatcattgcagcactggggccagatggtaagccctcccgtatcgtagttatctacacgacggggagtcaggcaactatggatgaacgaaatagacagatcgctgagataggtgcctcactgattaagcattggtaactgcagaccaagtttactcatatatactttagattgatttaaaacttcatttttaatttaaaaggatctaggtgaagatcctttttgataatctcatgaccaaaatcccttaacgtgagttttcgttccactgagcgtcagaccccgtagaaaagatcaaaggatcttcttgagatcctttttttctgcgcgtaatctgctgcttgcaaacaaaaaaaccaccgctaccagcggtggtttgtttgccggatcaagagctaccaactctttttccgaaggtaactggcttcagcagagcgcagataccaaatactgtccttctagtgtagccgtagttaggccaccacttcaagaactctgtagcaccgcctacatacctcgctctgctaatcctgttaccagtggctgctgccagtggcgataagtcgtgtcttaccgggttggactcaagacgatagttaccggataaggcgcagcggtcgggctgaacggggggttcgtgcacacagcccagcttggagcgaacgacctacaccgaactgagatacctacagcgtgagctatgagaaagcgccacgcttcccgaagggagaaaggcggacaggtatccggtaagcggcagggtcggaacaggagagcgcacgagggagcttccagggggaaacgcctggtatctttatagtcctgtcgggtttcgccacctctgacttgagcgtcgatttttgtgatgctcgtcaggggggcggagcctatggaaaaacgccagcaacgcggcctttttacggttcctggccttttgctgg

SEQ ID NO: 32 - DNA, 7332 bp, Artificial
  Synthetic
agacttagggaccctgcggccgccattaattcctaatttttgttgacactctatcattgatagagttattttaccactccctatcagtgatagagaaaagtgaaatgaatagaccggccgctgagaaaaagcgaagcggcactgctctttaacaatttatcagacaatctgtgtgggcactcgaagatacggattcttaacgtcgcaagacgaaaaatgaataccaagtctcaagagtgaacacgtaattcattacgaagtttaattctttgagcatcaaacttttaaattgaagagtttgatcatggctcagattgaacgctggcggcaggcctaacacatgcaagtcgaacggtaacaggaagcagcttgctgtttcgctgacgagtggcggacgggtgagtaatgtctgggaaactgcctgatggagggggataactactggaaacggtagctaataccgcataacgtcgcaagaccaaagagggggaccttcgggcctcttgccatcggatgtgcccagatgggattagctagtaggtggggtaacggctcacctaggcgacgatccctagctggtctgagaggatgaccagccacactggaactgagacacggtccagactcctacgggaggcagcagtggggaatattgcacaatgggcgcaagcctgatgcagccatgccgcgtgtatgaagaaggccttcgggttgtaaagtactttcagcggggaggaagggagtaaagttaatacctttactcattgacgttacccgcagaagaagcaccggctaactccgtgccagcagccgcggtaatacggagggtgcaagcgttaatcggaattactgggcgtaaagcgcacgcaggcggtttgttaagtcagatgtgaaatccccgggctcaacctgggaactgcatctgatactggcaagcttgagtctcgtagaggggggtagaattccaggtgtagcggtgaaatgcgtagagatctggaggaataccggtggcgaaggcggccccctggacgaagactgacgctcaggtgcgaaagcgtggggagcaaacaggattagataccctggtagtccacgccgtaaacgatgtcgacttggaggttgtgcccttgaggtgtggcttccggagctaacgcgttaagtcgaccgcctggggagtacggccgcaaggttaaaactcaaatgaattgacgggggcccgcacaagcggtggagcatgtggtttaattcgatgcaacgcgaagaaccttacctggtcttgacatccacggaagttttcagagatgagaatgtgccttcgggaaccgtgagacaggtgctgcatggctgtcgtcagctcgtgttgtgaaatgttgggttaagtcccgcaacgagcgcaacccttatcctttgttgccagcggtccggccgggaactcaaaggagactgccagtgataaactggaggaaggtggggatgacgtcaagtcatcatggcccttacgaccagggctacacacgtgctacaatggcgcatacaaagagaagcgacctcgcgagagcaagcggacctcataaagtgcgtcgtagtccggattggagtctgcaactcgactccatgaagtcggaatcgctagtaatcgtggatcagaatgccacggtgaatacgttcccgggccttgtacacaccgcccgtcacaccatgggagtgggttgcaaaagaagtaggtagcttaaccttcgggagggcgcttaccactttgtgattcatgactggggtgaagtcgtaacaaggtaaccgtaggggaacctgcggttggatcatgtggttaccttaaagaagcgttctttgtagtgctcacacagattgtctgatagaaagtgaaaagcaaggcgtcttgcgaagcagactgatacgtccccttcgtctagaggcccaggacaccgccctttcacggcggtaacaggggttcgaatcccctaggggacgccacttgctggtttgtgagtgaaagtcacctgccttgatatctcaaaactcatcttcgggtgatgtttgagatatttgctctttaaaaatctggatcaagctgaaaattgaaacactgaacaacgaaagttgttcgtgagtctctcaaattttcgcaacacgatgatgagtcgaaagaaacatcttcgggttgtgaggttaagcgactaagcgtacacggtggatgccctggcagtcagaggcgatgaaggacgtgctaatctgcgataagcgtcggtaaggtgatatgaaccgttataaccggcgatttccgaatggggaaacccagtgtgattcgtcacactatcattaactgaatccataggttaatgaggcgaaccgggggaactgaaacatctaagtaccccgaggaaaagaaatcaaccgagattcccccagtagcggcgagcgaacggggagcagcccagagcctgaatcagtgtgtgtgttagtggaagcgtctggaaaggcgtgcgatacagggtgacagccccgtacacaaaaatgcacatactgtgagctcgatgagtagggcgggacacgtggtatcctgtctgaatatggggggaccatcctccaaggctaaatactcctgactgaccgatagtgaaccagtaccgtgagggaaaggcgaaaagaaccccggcgaggggagtgaaaaagaacctgaaaccgtgtacgtacaagcagtgggagcacgcttaggcgtgtgactgcgtaccttttgtataatgggtcagcgacttatattctgtagcaaggttaaccgaataggggagccgaagggaaaccgagtcttaactgggcgttaagttgcagggtatagacccgaaacccggtgatctagccatgggcaggttgaaggttgggtaacactaactggaggaccgaaccgactaatgttgaaaaattagcggatgacttgtggctgggggtgaaaggccaatcaaaccgggagatagctggttctccccgaaagctatttaggtagcgcctcgtgaattcatctccgggggtagagcactgtttcggcaagggggtcatcccgacttaccaacccgatgcaaactgcgaataccggagaatgttatcacgggagacacacggcgggtgctaacgtccgtcgtgaagagggaaacaacccagaccgccagctaaggtcccaaagtcatggttaagtgggaaacgatgtgggaaggcccagacagccaggatgttggcttagaagcagccatcatttaaagaaagcgtaatagctcactggtcgagtcggcctgcgcggaagatgtaacggggctaaaccatgcaccgaagctgcggcagcgacgcttatgcgttgttgggtaggggagcgttctgtaagcctgtgaaggtgtgctgtgaggtatgctggaggtatcagaagtgcgaatgctgacataagtaacgataaagcgggtgaaaagcccgctcgccggaagaccaagggttcctgtccaacgttaatcggggcagggtgagtcgacccctaaggcgaggccgaaaggcgtagtcgatgggaaacaggttaatattcctgtacttggtgttactgcgaaggggggacggagaaggctatgttggccgggcgacggttgtcccggtttaagcgtgtaggctggttttccaggcaaatccggaaaatcaaggccgaggcgtgatgacgaggcactacggtgctgaagcaacaaatgccctgcttccaggaaaagcctctaagcatcaggtaacatcaaatcgtaccccaaaccgacacaggtggtcaggtagagaataccaaggcgcttgagagaactcgggtgaaggaactaggcaaaatggtgccgtaacttcgggagaaggcacgctgatacgtaggtgaagcgacttgctcgtggagctgaaatcagtcgaagataccagctggctgcaactgtttattaaaaacacagcactgtgcaaacacgaaagtggacgtatacggtgtgacgcctgcccggtgccggaaggttaattgatggggttagcgcaagcgaagctcttgatcgaagccccggtaaacggcggccgtaactataacggtcctaaggtagcgaaattccttgtcgggtaagttccgacctgcacgaatggcgtaatgatggccaggctgtctccacccgagactcagtgaaattgaactcgctgtgaagatgcagtgtacccgcggcaagacggaaagaccccgtgaacctttactatagcttgacactgaacattgagccttgatgtgtaggataggtgggaggctttgaagtgtggacgccagtctgcatggagccgaccttgaaataccaccctttaatgtttgatgttctaacgtggacccgtgatccgggttgcggacagtgtctggtgggtagtttgactggggcggtctcctcctaaagagtaacggaggagcacgaaggttggctaatcctggtcggacatcaggaggttagtgcaatggcataagccagcttgactgcgagcgtgacggcgcgagcaggtgcgaaagcaggtcatagtgatccggtggttctgaatggaagggccatcgctcaacggataaaaggtactccggggataacaggctgataccgcccaagagttcatatcgacggcggtgtttggcacctcgatgtcggctcatcacatcctggggctgaagtaggtcccaagggtatggctgttcgccatttaaagtggtacgcgagctgggtttagaacgtcgtgagacagttcggtccctatctgccgtgggcgctggagaactgaggggggctgctcctagtacgagaggaccggagtggacgcatcactggtgttcgggttgtcatgccaatggcactgcccggtagctaaatgcggaagagataagtgctgaaagcatctaagcacgaaacttgccccgagatgagttctccctgaccctttaagggtcctgaaggaacgttgaagacgacgacgttgataggccgggtgtgtaagcgcagcgatgcgttgagctaaccggtactaatgaaccgtgaggcttaaccttacaacgccgaagatgttttggcggattgagagaagattttcagcctgatacagattaaatcagaacgcagaagcggtctgataaaacagaattagcctggcggccgtagcgcggtggtcccacctgaccccatgccgaactcagaagtgaaacgccgtagcgccgatggtagtgtggggtctccccatgcgagagtagggaactgccaggcatcaaattaagcagtaagccggtcgtaaaaccggtggttgtaaaagaattcggtggagcggtagttcagtcggttagaatacctgcctgtcacgcagggggtcgcgggttcgagtcccgtccgttccgccaccctaattaggggcgtagttcaattggtagagcaccggtctccaaaaccgggtgttgggagttcgagtctctccgcccctgccagaaatcatccttagcgaaagctaaggatttttttgcgcgccgggaaatgtgcgcggaacccctatttgtttatttttctaaatacattcaaatatgtatccgctcatgagacaataaccctgataaatgcttcaataatattgaaaaaggaagagtatgagtattcaacatttccgtgtcgcccttattcccttttttgcggcattttgccttcctgtttttgctcacccagaaacgctggtgaaagtaaaagatgctgaagatcagttgggtgcacgagtgggttacatcgaactggatctcaacagcggtaagatccttgagagttttcgccccgaagaacgttttccaatgatgagcacttttaaagttctgctatgtggcgcggtattatcccgtgttgacgccgggcaagagcaactcggtcgccgcatacactattctcagaatgacttggttgagtactcaccagtcacagaaaagcatcttacggatggcatgacagtaagagaattatgcagtgctgcaataaccatgagtgataacactgcggccaacttacttctgacaacgatcggaggaccgaaggagctaaccgcttttttgcacaacatgggggatcatgtaactcgccttgatcgttgggaaccggagctgaatgaagccataccaaacgacgagcgtgacaccacgatgcctgcagcaatggcaacaacgttgcgcaaactattaactggcgaactacttactctagcttcccggcaacaattaatagactggatggaggcggataaagttgcaggaccacttctgcgctcggcccttccggctagctggtttattgctgataaatctggagccggtgagcgtgggtctcgcggtatcattgcagcactggggccagatggtaagccctcccgtatcgtagttatctacacgacggggagtcaggcaactatggatgaacgaaatagacagatcgctgagataggtgcctcactgattaagcattggtaactgcagaccaagtttactcatatatactttagattgatttaaaacttcatttttaatttaaaaggatctaggtgaagatcctttttgataatctcatgaccaaaatcccttaacgtgagttttcgttccactgagcgtcagaccccgtagaaaagatcaaaggatcttcttgagatcctttttttctgcgcgtaatctgctgcttgcaaacaaaaaaaccaccgctaccagcggtggtttgtttgccggatcaagagctaccaactctttttccgaaggtaactggcttcagcagagcgcagataccaaatactgtccttctagtgtagccgtagttaggccaccacttcaagaactctgtagcaccgcctacatacctcgctctgctaatcctgttaccagtggctgctgccagtggcgataagtcgtgtcttaccgggttggactcaagacgatagttaccggataaggcgcagcggtcgggctgaacggggggttcgtgcacacagcccagcttggagcgaacgacctacaccgaactgagatacctacagcgtgagctatgagaaagcgccacgcttcccgaagggagaaaggcggacaggtatccggtaagcggcagggtcggaacaggagagcgcacgagggagcttccagggggaaacgcctggtatctttatagtcctgtcgggtttcgccacctctgacttgagcgtcgatttttgtgatgctcgtcaggggggcggagcctatggaaaaacgccagcaacgcggcctttttacggttcctggccttttgctgg

SEQ ID NO: 33 - DNA, 7417 bp, Artificial
  Synthetic
agacttagggaccctgcggccgccattaattcctaatttttgttgacactctatcattgatagagttattttaccactccctatcagtgatagagaaaagtgaaatgaatagaccggccgctgagaaaaagcgaagcggcactgctctttaacaatttatcagacaatctgtgtgggcactcgaagatacggattcttaacgtcgcaagacgaaaaatgaataccaagtctcaagagtgaacacgtaattcattacgaagtttaattctttgagcgtcaaacttttaaattgaagagtttgatcatggctcagattgaacgctggcggcaggcctaacacatgcaagtcgaacggtaacaggaagcagcttgctgtttcgctgacgagtggcggacgggtgagtaatgtctgggaaactgcctgatggagggggataactactggaaacggtagctaataccgcataacgtcgcaagaccaaagagggggaccttcgggcctcttgccatcggatgtgcccagatgggattagctagtaggtggggtaacggctcacctaggcgacgatccctagctggtctgagaggatgaccagccacactggaactgagacacggtccagactcctacgggaggcagcagtggggaatattgcacaatgggcgcaagcctgatgcagccatgccgcgtgtatgaagaaggccttcgggttgtaaagtactttcagcggggaggaagggagtaaagttaatacctttactcattgacgttacccgcagaagaagcaccggctaactccgtgccagcagccgcggtaatacggagggtgcaagcgttaatcggaattactgggcgtaaagcgcacgcaggcggtttgttaagtcagatgtgaaatccccgggctcaacctgggaactgcatctgatactggcaagcttgagtctcgtagaggggggtagaattccaggtgtagcggtgaaatgcgtagagatctggaggaataccggtggcgaaggcggccccctggacgaagactgacgctcaggtgcgaaagcgtggggagcaaacaggattagataccctggtagtccacgccgtaaacgatgtcgacttggaggttgtgcccttgaggtgtggcttccggagctaacgcgttaagtcgaccgcctggggagtacggccgcaaggttaaaactcaaatgaattgacgggggcccgcacaagcggtggagcatgtggtttaattcgatgcaacgcgaagaaccttacctggtcttgacatccacggaagttttcagagatgagaatgtgccttcgggaaccgtgagacaggtgctgcatggctgtcgtcagctcgtgttgtgaaatgttgggttaagtcccgcaacgagcgcaacccttatcctttgttgccagcggtccggccgggaactcaaaggagactgccagtgataaactggaggaaggtggggatgacgtcaagtcatcatggcccttacgaccagggctacacacgtgctacaatggcgcatacaaagagaagcgacctcgcgagagcaagcggacctcataaagtgcgtcgtagtccggattggagtctgcaactcgactccatgaagtcggaatcgctagtaatcgtggatcagaatgccacggtgaatacgttcccgggccttgtacacaccgcccgtcacaccatgggagtgggttgcaaaagaagtaggtagcttaaccttcgggagggcgcttaccactttgtgattcatgactggggtgaagtcgtaacaaggtaaccgtaggggaacctgcggttggatcatgtggttaccttaaagaagcgtactttgtagtgctcacacagattgtctgatagaaagtgaaaagcaaggcgtttacgcgttgggagtgaggctgaagagaataaggccgttcgctttctattaatgaaagctcaccctacacgaaaatatcacgcaacgcgtgataagcaattttcgtgtccccttcgtctagaggcccaggacaccgccctttcacggcggtaacaggggttcgaatcccctaggggacgccacttgctggtttgtgagtgaaagtcgccgaccttaatatctcaaaactcatcttcgggtgatgtttgagatatttgctctttaaaaatctggatcaagctgaaaattgaaacactgaacaacgagagttgttcgtgagtctctcaaattttcgcaacacgatgatgaatcgaaagaaacatcttcgggttgtgaggttaagcgactaagcgtacacggtggatgccctggcagtcagaggcgatgaaggacgtgctaatctgcgataagcgtcggtaaggtgatatgaaccgttataaccggcgatttccgaatggggaaacccagtgtgattcgtcacactatcattaactgaatccataggttaatgaggcgaaccgggggaactgaaacatctaagtaccccgaggaaaagaaatcaaccgagattcccccagtagcggcgagcgaacggggagcagcccagagcctgaatcagtgtgtgtgttagtggaagcgtctggaaaggcgtgcgatacagggtgacagccccgtacacaaaaatgcacatactgtgagctcgatgagtagggcgggacacgtggtatcctgtctgaatatggggggaccatcctccaaggctaaatactcctgactgaccgatagtgaaccagtaccgtgagggaaaggcgaaaagaaccccggcgaggggagtgaaaaagaacctgaaaccgtgtacgtacaagcagtgggagcacgcttaggcgtgtgactgcgtaccttttgtataatgggtcagcgacttatattctgtagcaaggttaaccgaataggggagccgaagggaaaccgagtcttaactgggcgttaagttgcagggtatagacccgaaacccggtgatctagccatgggcaggttgaaggttgggtaacactaactggaggaccgaaccgactaatgttgaaaaattagcggatgacttgtggctgggggtgaaaggccaatcaaaccgggagatagctggttctccccgaaagctatttaggtagcgcctcgtgaattcatctccgggggtagagcactgtttcggcaagggggtcatcccgacttaccaacccgatgcaaactgcgaataccggagaatgttatcacgggagacacacggcgggtgctaacgtccgtcgtgaagagggaaacaacccagaccgccagctaaggtcccaaagtcatggttaagtgggaaacgatgtgggaaggcccagacagccaggatgttggcttagaagcagccatcatttaaagaaagcgtaatagctcactggtcgagtcggcctgcgcggaagatgtaacggggctaaaccatgcaccgaagctgcggcagcgacgcttatgcgttgttgggtaggggagcgttctgtaagcctgtgaaggtgtgctgtgaggtatgctggaggtatcagaagtgcgaatgctgacataagtaacgataaagcgggtgaaaagcccgctcgccggaagaccaagggttcctgtccaacgttaatcggggcagggtgagtcgacccctaaggcgaggccgaaaggcgtagtcgatgggaaacaggttaatattcctgtacttggtgttactgcgaaggggggacggagaaggctatgttggccgggcgacggttgtcccggtttaagcgtgtaggctggttttccaggcaaatccggaaaatcaaggccgaggcgtgatgacgaggcactacggtgctgaagcaacaaatgccctgcttccaggaaaagcctctaagcatcaggtaacatcaaatcgtaccccaaaccgacacaggtggtcaggtagagaataccaaggcgcttgagagaactcgggtgaaggaactaggcaaaatggtgccgtaacttcgggagaaggcacgctgatacgtaggtgaagcgacttgctcgtggagctgaaatcagtcgaagataccagctggctgcaactgtttattaaaaacacagcactgtgcaaacacgaaagtggacgtatacggtgtgacgcctgcccggtgccggaaggttaattgatggggttagcgcaagcgaagctcttgatcgaagccccggtaaacggcggccgtaactataacggtcctaaggtagcgaaattccttgtcgggtaagttccgacctgcacgaatggcgtaatgatggccaggctgtctccacccgagactcagtgaaattgaactcgctgtgaagatgcagtgtacccgcggcaagacggaaagaccccgtgaacctttactatagcttgacactgaacattgagccttgatgtgtaggataggtgggaggctttgaagtgtggacgccagtctgcatggagccgaccttgaaataccaccctttaatgtttgatgttctaacgtggacccgtgatccgggttgcggacagtgtctggtgggtagtttgactggggcggtctcctcctaaagagtaacggaggagcacgaaggttggctaatcctggtcggacatcaggaggttagtgcaatggcataagccagcttgactgcgagcgtgacggcgcgagcaggtgcgaaagcaggtcatagtgatccggtggttctgaatggaagggccatcgctcaacggataaaaggtactccggggataacaggctgataccgcccaagagttcatatcgacggcggtgtttggcacctcgatgtcggctcatcacatcctggggctgaagtaggtcccaagggtatggctgttcgccatttaaagtggtacgcgagctgggtttagaacgtcgtgagacagttcggtccctatctgccgtgggcgctggagaactgaggggggctgctcctagtacgagaggaccggagtggacgcatcactggtgttcgggttgtcatgccaatggcactgcccggtagctaaatgcggaagagataagtgctgaaagcatctaagcacgaaacttgccccgagatgagttctccctgaccctttaagggtcctgaaggaacgttgaagacgacgacgttgataggccgggtgtgtaagcgcagcgatgcgttgagctaaccggtactaatgaaccgtgaggcttaaccttacaacgccgaagctgttttggcggatgagagaagattttcagcctgatacagattaaatcagaacgcagaagcggtctgataaaacagaattgcctggcggccgtagcgcggtggtcccacctgaccccatgccgaactcagaagtgaaacgccgtagcgccgatggtagtgtggggtctccccatgcgagagtagggaactgccaggcatcaaataaaacgaaaggctcagtcgaaagactgggcctttcgttttatctgttgtttgtcggtgaacgctctcctgagtaggacaaatccgccgggagcggatttgaacgttgcgaagcaacggcccggagggtggcgggcaggacgcccgccataaactgccaggcatcaaattaagcagaaggccatcctgacggatggcctttttgcgtttctacaaactcttcctgtcgtcatatctacaagccggcgcgccgggaaatgtgcgcggaacccctatttgtttatttttctaaatacattcaaatatgtatccgctcatgagacaataaccctgataaatgcttcaataatattgaaaaaggaagagtatgagtattcaacatttccgtgtcgcccttattcccttttttgcggcattttgccttcctgtttttgctcacccagaaacgctggtgaaagtaaaagatgctgaagatcagttgggtgcacgagtgggttacatcgaactggatctcaacagcggtaagatccttgagagttttcgccccgaagaacgttttccaatgatgagcacttttaaagttctgctatgtggcgcggtattatcccgtgttgacgccgggcaagagcaactcggtcgccgcatacactattctcagaatgacttggttgagtactcaccagtcacagaaaagcatcttacggatggcatgacagtaagagaattatgcagtgctgcaataaccatgagtgataacactgcggccaacttacttctgacaacgatcggaggaccgaaggagctaaccgcttttttgcacaacatgggggatcatgtaactcgccttgatcgttgggaaccggagctgaatgaagccataccaaacgacgagcgtgacaccacgatgcctgcagcaatggcaacaacgttgcgcaaactattaactggcgaactacttactctagcttcccggcaacaattaatagactggatggaggcggataaagttgcaggaccacttctgcgctcggcccttccggctagctggtttattgctgataaatctggagccggtgagcgtgggtctcgcggtatcattgcagcactggggccagatggtaagccctcccgtatcgtagttatctacacgacggggagtcaggcaactatggatgaacgaaatagacagatcgctgagataggtgcctcactgattaagcattggtaactgcagaccaagtttactcatatatactttagattgatttaaaacttcatttttaatttaaaaggatctaggtgaagatcctttttgataatctcatgaccaaaatcccttaacgtgagttttcgttccactgagcgtcagaccccgtagaaaagatcaaaggatcttcttgagatcctttttttctgcgcgtaatctgctgcttgcaaacaaaaaaaccaccgctaccagcggtggtttgtttgccggatcaagagctaccaactctttttccgaaggtaactggcttcagcagagcgcagataccaaatactgtccttctagtgtagccgtagttaggccaccacttcaagaactctgtagcaccgcctacatacctcgctctgctaatcctgttaccagtggctgctgccagtggcgataagtcgtgtcttaccgggttggactcaagacgatagttaccggataaggcgcagcggtcgggctgaacggggggttcgtgcacacagcccagcttggagcgaacgacctacaccgaactgagatacctacagcgtgagctatgagaaagcgccacgcttcccgaagggagaaaggcggacaggtatccggtaagcggcagggtcggaacaggagagcgcacgagggagcttccagggggaaacgcctggtatctttatagtcctgtcgggtttcgccacctctgacttgagcgtcgatttttgtgatgctcgtcaggggggcggagcctatggaaaaacgccagcaacgcggcctttttacggttcctggccttttgctgg

SEQ ID NO: 34 - DNA, 7565 bp, Artificial
  Synthetic
agacttagggaccctgcggccgccattaattcctaatttttgttgacactctatcattgatagagttattttaccactccctatcagtgatagagaaaagtgaaatgaatagaccggccgctgagaaaaagcgaagcggcactgctctttaacaatttatcagacaatctgtgtgggcactcgaagatacggattcttgacgtcgcaagacgaaaaatgaataccaagtctcaagagtgaacacgtaattcattacgaagtttaattctttgagcatcaaacttttaaattgaagagtttgatcatggctcagattgaacgctggcggcaggcctaacacatgcaagtcgaacggtaacaggaagcagcttgctgcttcgctgacgagtggcggacgggtgagtaatgtctgggaaactgcctgatggagggggataactactggaaacggtggctaataccgcataacgtcgcaagaccaaagagggggaccttcgggcctcttgccatcagatgtgcccagatgggattagctagttggtgaggtaacggctcaccaaggcgacgatccctagctggtctgagaggatgaccagccacactggaactgagacacggtccagactcctacgggaggcagcagtggggaatattgcacaatgggcgcaagcctgatgcagccatgccgcgtgtatgaagaaggccttcgggttgtaaagtactttcagcggggaggaaggtgttgtggttaataaccgcagcaattgacgttacccgcagaagaagcaccggctaactccgtgccagcagccgcggtaatacggagggtgcaagcgttaatcggaattactgggcgtaaagcgcacgcaggcggtctgtcaagtcggatgtgaaatccccgggctcaacctgggaactgcattcgaaactggcaggcttgagtcttgtagaggggggtagaattccaggtgtagcggtgaaatgcgtagagatctggaggaataccggtggcgaaggcggccccctggacaaagactgacgctcaggtgcgaaagcgtggggagcaaacaggattagataccctggtagtccacgccgtaaacgatgtctacttggaggttgtgcccttgaggcgtggcttccggagctaacgcgttaagtagaccgcctggggagtacggccgcaaggttaaaactcaaatgaattgacgggggcccgcacaagcggtggagcatgtggtttaattcgatgcaacgcgaagaaccttacctggtcttgacatccacagaactttccagagatggattggtgccttcgggaactgtgagacaggtgctgcatggctgtcgtcagctcgtgttgtgaaatgttgggttaagtcccgcaacgagcgcaacccttatcctttgttgccagcgattaggtcgggaactcaaaggagactgccagtgataaactggaggaaggtggggatgacgtcaagtcatcatggcccttacgaccagggctacacacgtgctacaatggcgcatacaaagagaagcgacctcgcgagagcaagcggacctcataaagtgcgtcgtagtccggattggagtctgcaactcgactccatgaagtcggaatcgctagtaatcgtggatcagaatgccacggtgaatacgttcccgggccttgtacacaccgcccgtcacaccatgggagtgggttgcaaaagaagtaggtagcttaaccttcgggagggcgcttaccactttgtgattcatgactggggtgaagtcgtaacaaggtaaccgtaggggaaacctgcggttggatcacctccttaccttaaagaagcgtactttgaagtgctcacacagattgtctgatgaaaagtgaatagcaaggcgtcttgcgattgagacttcagtgtccccttcgtctagaggcccaggacaccgccctttcacggcggtaacaggggttcgaatcccctaggggacgccagcgttcaaactgatgaggtcaaacctccaggggacgccacttgctggtttgtgagtgaaagtcacctgccttaatatctcaaaactgacttacgagtcacgtttgagatatttgctctttaaaaatctggatcaagctgaaaattgaaacacagaacaacgaaagttgttcgtgagtctctcaaattttcgcaacacgatgatgaatcgtaagaaacatcttcgggttgtgaggttaagcgactaagcgtacacggtggatgccctggcagtcagaggcgatgaagggcgtgctaatctgcgataagcgccggtaaggtgatatgaaccgttataaccggcgatacccgaatggggaaacccagtgtgattcgtcacactatcattaactgaatccataggttaatgaggcgaaccgggggaactgaaacatctaagtaccccgaggaaaagaaatcaaccgagattcccccagtagcggcgagcgaacggggaggagcccagagcctgaatcagcatgtgtgttagtggaagcgtctggaaaggtgcgcgatacagggtgacagccccgtacacaaaagcgcatgtgctgtgagctcgatgagtagggcgggacacgtggtatcctgtctgaatatggggggaccatcctccaaggctaaatactcctgactgaccgatagtgaaccagtaccgtgagggaaaggcgaaaagaaccccggcgaggggagtgaaaaagaacctgaaaccgtgtacgtacaagcagtgggagcacaggtttacctgtgtgactgcgtaccttttgtataatgggtcagcgacttatattctgtagcaaggttaaccgtataggggagccgtagggaaaccgagtcttaaccgggcgttaagttgcagggtatagacccgaaacccggtgatctagccatgggcaggttgaaggttgggtaacactaactggaggaccgaaccgactaatgttgaaaaattagcggatgacctgtggctgggggtgaaaggccaatcaaaccgggagatagctggttctccccgaaagctatttaggtagcgcctcgtgaattcatctccgggggtagagcactgtttcggctagggggccatcccggcttaccaacccgatgcaaactgcgaataccggagaatgttatcacgggagacacacggcgggtgctaacgtccgtcgtgaagagggaaacaacccagaccgccagctaaggtcccaaagtcatggttaagtgggaaacgatgtgggaaggcccagacagccaggatgttggcttagaagcagccatcatttaaagaaagcgtaatagctcactggtcgagtcggcctgcgcggaagatgtaacggggctaaaccatgcaccgaagctgcggcagcgaacgtatcacccaagacaactttacggagttgacgattgacggagcgaagcgacgtcaaagcgttcattaaagtcgagttggcttagggatacgttcgttgggtaggggagcgttctgtaagcctgtgaaggtgtgtcgtgaggcatgctggaggtatcagaagtgcgaatgctgacataagtaacgataaagcgggtgaaaagcccgctcgccggaagaccaagggttcctgtccaacgttaatcggggcagggtgagtcgacccctaaggcgaggccgaaaggcgtagtcgatgggaaacgggttaatattcccgtacttggtgttactgcgaaggggggacggagaaggctatgttggccgggcgacggttgtcccggtttaagcgtgtaggtgtgtgttccaggtaaatccggttcactttaacactgaggcgtgacgacgaggcactacggtgctgaagcaacaaatgccctgcttccaggaaaagcctctaagcatcaggtaacacgaaatcgtaccccaaaccgacacaggtggtcaggtagagaataccaaggcgcttgagagaactcgggtgaaggaactaggcaaaatggtgccgtaacttcgggagaaggcacgctgacacgtaggtgaagtgatttactcatggagctgaagtcagtcgaagataccagctggctgcaactgtttattaaaaacacagcactgtgcaaacacgaaagtggacgtatacggtgtgacgcctgcccggtgccggaaggttaattgatggggtcagcgcaagcgaagctcctgatcgaagccccggtaaacggcggccgtaactataacggtcctaaggtagcgaaattccttgtcgggtaagttccgacctgcacgaatggcgtaatgatggccaggctgtctccacccgagactcagtgaaattgaactcgctgtgaagatgcagtgtacccgcggcaagacggaaagaccccgtgaacctttactatagcttgacactgaacattgagccttgatgtgtaggataggtgggaggctttgaagtgtggacgccagtctgcatggagccgaccttgaaataccaccctttaatgtttgatgttctaacgtggacccgtaatccgggttgcggacagtgtctggtgggtagtttgactggggcggtctcctcctaaagagtaacggaggagcacgaaggttggctaatcctggtcggacatcaggaggttagtgcaatggcataagccagcttgactgcgagcgtgacggcgcgagcaggtgcgaaagcaggtcatagtgatccggtggttctgaatggaagggccatcgctcaacggataaaaggtactccggggataacaggctgataccgcccaagagttcatatcgacggcggtgtttggcacctcgatgtcggctcatcacatcctggggctgaagtaggtcccaagggtatggctgttcgccatttaaagtggtacgcgagctgggtttagaacgtcgtgagacagttcggtccctatctgccgtgggcgctggagaactgaggggggctgctcctagtacgagaggaccggagtggacgcatcactggtgttcgggttgtcatgccaatggcactgcccggtagctaaatgcggaagagataagtgctgaaagcatctaagcacgaaacttgccccgagatgagttctccctgagacttagagtctcctgaaggaacgttgaagacgacgacgttgataggccgggtgtgtaagcgcagcgatgcgttgagctaaccggtactaatgaaccgtgaggcttaaccttacaacgccgaagatgttttggcggttaagagaagattttcagcactgattccggattttcgggaacgaaagattttacgctgaggcaaggcggcaaatgaaggaaaggaaggagcatacagaagtatgtgactgactttgcgaatgcagccaacgcagcatcggtgtaaaagattcgtttctggcaacagaatttgcctggcggccgtagcgcggtggtcccacctgaccccatgccgaactcagaagtgaaacgccgtagcgccgatggtagtgtggggtctccccatgcgagagtagggaactgccaggcatcaaattaagcaaaaggctcagtcgaaagactgggccttttgttttatctgtggtctgtcggtgagcactctcctgaggaggagaaatccgccgggagcggatttgaacgttgcgcagcaacggcccggagggtggcgggcaggacgcccgccataaactgccaggcatcaaacaagtgaagaagcccgtccgtcaggacgggcttttttgcgtgtgcggtaactgtaaaaatgtaggcctgataagcgcaggcgcgccgggaaatgtgcgcggaacccctatttgtttatttttctaaatacattcaaatatgtatccgctcatgagacaataaccctgataaatgcttcaataatattgaaaaaggaagagtatgagtattcaacatttccgtgtcgcccttattcccttttttgcggcattttgccttcctgtttttgctcacccagaaacgctggtgaaagtaaaagatgctgaagatcagttgggtgcacgagtgggttacatcgaactggatctcaacagcggtaagatccttgagagttttcgccccgaagaacgttttccaatgatgagcacttttaaagttctgctatgtggcgcggtattatcccgtgttgacgccgggcaagagcaactcggtcgccgcatacactattctcagaatgacttggttgagtactcaccagtcacagaaaagcatcttacggatggcatgacagtaagagaattatgcagtgctgcaataaccatgagtgataacactgcggccaacttacttctgacaacgatcggaggaccgaaggagctaaccgcttttttgcacaacatgggggatcatgtaactcgccttgatcgttgggaaccggagctgaatgaagccataccaaacgacgagcgtgacaccacgatgcctgcagcaatggcaacaacgttgcgcaaactattaactggcgaactacttactctagcttcccggcaacaattaatagactggatggaggcggataaagttgcaggaccacttctgcgctcggcccttccggctagctggtttattgctgataaatctggagccggtgagcgtgggtctcgcggtatcattgcagcactggggccagatggtaagccctcccgtatcgtagttatctacacgacggggagtcaggcaactatggatgaacgaaatagacagatcgctgagataggtgcctcactgattaagcattggtaactgcagaccaagtttactcatatatactttagattgatttaaaacttcatttttaatttaaaaggatctaggtgaagatcctttttgataatctcatgaccaaaatcccttaacgtgagttttcgttccactgagcgtcagaccccgtagaaaagatcaaaggatcttcttgagatcctttttttctgcgcgtaatctgctgcttgcaaacaaaaaaaccaccgctaccagcggtggtttgtttgccggatcaagagctaccaactctttttccgaaggtaactggcttcagcagagcgcagataccaaatactgtccttctagtgtagccgtagttaggccaccacttcaagaactctgtagcaccgcctacatacctcgctctgctaatcctgttaccagtggctgctgccagtggcgataagtcgtgtcttaccgggttggactcaagacgatagttaccggataaggcgcagcggtcgggctgaacggggggttcgtgcacacagcccagcttggagcgaacgacctacaccgaactgagatacctacagcgtgagctatgagaaagcgccacgcttcccgaagggagaaaggcggacaggtatccggtaagcggcagggtcggaacaggagagcgcacgagggagcttccagggggaaacgcctggtatctttatagtcctgtcgggtttcgccacctctgacttgagcgtcgatttttgtgatgctcgtcaggggggcggagcctatggaaaaacgccagcaacgcggcctttttacggttcctggccttttgctgg

SEQ ID NO: 35 - DNA, 7507 bp, Artificial
  Synthetic
agacttagggaccctgcggccgccattaattcctaatttttgttgacactctatcattgatagagttattttaccactccctatcagtgatagagaaaagtgaaatgaatagaccggccgctgagaaaaagcgaagcggcactgctctttaacaatttatcagacaatctgtgtgggcactcgaagatacggattcttaacgtcgcaagacgaaaaatgaataccaagtctcaagagtgaacacgtaattcattacgaagtttaattctttgagcgtcaaacttttaaattgaagagtttgatcatggctcagattgaacgctggcggcaggcctaacacatgcaagtcgaacggtaacaggaagcagcttgctgcttcgctgacgagtggcggacgggtgagtaatgtctgggaaactgcctgatggagggggataactactggaaacggtggctaataccgcataacgtcgcaagaccaaagagggggaccttcgggcctcttgccatcagatgtgcccagatgggattagctagttggtgaggtaacggctcaccaaggcgacgatccctagctggtctgagaggatgaccagccacactggaactgagacacggtccagactcctacgggaggcagcagtggggaatattgcacaatgggcgcaagcctgatgcagccatgccgcgtgtatgaagaaggccttcgggttgtaaagtactttcagcggggaggaaggtgttgtggttaataaccgcagcaattgacgttacccgcagaagaagcaccggctaactccgtgccagcagccgcggtaatacggagggtgcaagcgttaatcggaattactgggcgtaaagcgcacgcaggcggtctgtcaagtcggatgtgaaatccccgggctcaacctgggaactgcattcgaaactggcaggcttgagtcttgtagaggggggtagaattccaggtgtagcggtgaaatgcgtagagatctggaggaataccggtggcgaaggcggccccctggacaaagactgacgctcaggtgcgaaagcgtggggagcaaacaggattagataccctggtagtccacgccgtaaacgatgtctacttggaggttgtgcccttgaggcgtggcttccggagctaacgcgttaagtagaccgcctggggagtacggccgcaaggttaaaactcaaatgaattgacgggggcccgcacaagcggtggagcatgtggtttaattcgatgcaacgcgaagaaccttacctggtcttgacatccacagaactttccagagatggattggtgccttcgggaactgtgagacaggtgctgcatggctgtcgtcagctcgtgttgtgaaatgttgggttaagtcccgcaacgagcgcaacccttatcctttgttgccagcgattaggtcgggaactcaaaggagactgccagtgataaactggaggaaggtggggatgacgtcaagtcatcatggcccttacgaccagggctacacacgtgctacaatggcgcatacaaagagaagcgacctcgcgagagcaagcggacctcataaagtgcgtcgtagtccggattggagtctgcaactcgactccatgaagtcggaatcgctagtaatcgtggatcagaatgccacggtgaatacgttcccgggccttgtacacaccgcccgtcacaccatgggagtgggttgcaaaagaagtaggtagcttaaccttcgggagggcgcttaccactttgtgattcatgactggggtgaagtcgtaacaaggtaaccgtaggggaacctgcggttggatcacctccttaccttaaagaagcgtactttgtagtgctcacacagattgtctgatagaaagtgaaaagcaaggcgtttacgcgttgggagtgaggctgaagagaataaggccgttcgctttctattaatgaaagctcaccctacacgaaaatatcacgcaacgcgtgataagcaattttcgtgtccccttcgtctagaggcccaggacaccgccctttcacggcggtaacaggggttcgaatcccctaggggacgccacttgctggtttgtgagtgaaagtcgccgaccttaatatctcaaaactcatcttcgggtgatgtttgagatatttgctctttaaaaatctggatcaagctgaaaattgaaacactgaacaacgagagttgttcgtgagtctctcaaattttcgcaacacgatgatgaatcgaaagaaacatcttcgggttgtgaggttaagcgactaagcgtacacggtggatgccctggcagtcagaggcgatgaagggcgtgctaatctgcgataagcgccggtaaggtgatatgaaccgttataaccggcgatacccgaatggggaaacccagtgtgattcgtcacactatcattaactgaatccataggttaatgaggcgaaccgggggaactgaaacatctaagtaccccgaggaaaagaaatcaaccgagattcccccagtagcggcgagcgaacggggaggagcccagagcctgaatcagcatgtgtgttagtggaagcgtctggaaaggtgcgcgatacagggtgacagccccgtacacaaaagcgcatgtgctgtgagctcgatgagtagggcgggacacgtggtatcctgtctgaatatggggggaccatcctccaaggctaaatactcctgactgaccgatagtgaaccagtaccgtgagggaaaggcgaaaagaaccccggcgaggggagtgaaaaagaacctgaaaccgtgtacgtacaagcagtgggagcacaggtttacctgtgtgactgcgtaccttttgtataatgggtcagcgacttatattctgtagcaaggttaaccgtataggggagccgtagggaaaccgagtcttaaccgggcgttaagttgcagggtatagacccgaaacccggtgatctagccatgggcaggttgaaggttgggtaacactaactggaggaccgaaccgactaatgttgaaaaattagcggatgacctgtggctgggggtgaaaggccaatcaaaccgggagatagctggttctccccgaaagctatttaggtagcgcctcgtgaattcatctccgggggtagagcactgtttcggctagggggccatcccggcttaccaacccgatgcaaactgcgaataccggagaatgttatcacgggagacacacggcgggtgctaacgtccgtcgtgaagagggaaacaacccagaccgccagctaaggtcccaaagtcatggttaagtgggaaacgatgtgggaaggcccagacagccaggatgttggcttagaagcagccatcatttaaagaaagcgtaatagctcactggtcgagtcggcctgcgcggaagatgtaacggggctaaaccatgcaccgaagctgcggcagcgaacgtatcacccaagacaactttacggagttgacgattgacggagcgaagcgacgtcaaagcgttcattaaagtcgagttggcttagggatacgttcgttgggtaggggagcgttctgtaagcctgtgaaggtgtgtcgtgaggcatgctggaggtatcagaagtgcgaatgctgacataagtaacgataaagcgggtgaaaagcccgctcgccggaagaccaagggttcctgtccaacgttaatcggggcagggtgagtcgacccctaaggcgaggccgaaaggcgtagtcgatgggaaacgggttaatattcccgtacttggtgttactgcgaaggggggacggagaaggctatgttggccgggcgacggttgtcccggtttaagcgtgtaggtgtgtgttccaggtaaatccggttcactttaacactgaggcgtgacgacgaggcactacggtgctgaagcaacaaatgccctgcttccaggaaaagcctctaagcatcaggtaacacgaaatcgtaccccaaaccgacacaggtggtcaggtagagaataccaaggcgcttgagagaactcgggtgaaggaactaggcaaaatggtgccgtaacttcgggagaaggcacgctgacacgtaggtgaagtgatttactcatggagctgaagtcagtcgaagataccagctggctgcaactgtttattaaaaacacagcactgtgcaaacacgaaagtggacgtatacggtgtgacgcctgcccggtgccggaaggttaattgatggggtcagcgcaagcgaagctcctgatcgaagccccggtaaacggcggccgtaactataacggtcctaaggtagcgaaattccttgtcgggtaagttccgacctgcacgaatggcgtaatgatggccaggctgtctccacccgagactcagtgaaattgaactcgctgtgaagatgcagtgtacccgcggcaagacggaaagaccccgtgaacctttactatagcttgacactgaacattgagccttgatgtgtaggataggtgggaggctttgaagtgtggacgccagtctgcatggagccgaccttgaaataccaccctttaatgtttgatgttctaacgtggacccgtaatccgggttgcggacagtgtctggtgggtagtttgactggggcggtctcctcctaaagagtaacggaggagcacgaaggttggctaatcctggtcggacatcaggaggttagtgcaatggcataagccagcttgactgcgagcgtgacggcgcgagcaggtgcgaaagcaggtcatagtgatccggtggttctgaatggaagggccatcgctcaacggataaaaggtactccggggataacaggctgataccgcccaagagttcatatcgacggcggtgtttggcacctcgatgtcggctcatcacatcctggggctgaagtaggtcccaagggtatggctgttcgccatttaaagtggtacgcgagctgggtttagaacgtcgtgagacagttcggtccctatctgccgtgggcgctggagaactgaggggggctgctcctagtacgagaggaccggagtggacgcatcactggtgttcgggttgtcatgccaatggcactgcccggtagctaaatgcggaagagataagtgctgaaagcatctaagcacgaaacttgccccgagatgagttctccctgagacttagagtctcctgaaggaacgttgaagacgacgacgttgataggccgggtgtgtaagcgcagcgatgcgttgagctaaccggtactaatgaaccgtgaggcttaaccttacaacgccgaagctgttttggcggatgagagaagattttcagcctgatacagattaaatcagaacgcagaagcggtctgataaaacagaattttgcctggcggccgtagcgcggtggtcccacctgaccccatgccgaactcagaagtgaaacgccgtagcgccgatggtagtgtggggtctccccatgcgagagtagggaactgccaggcatcaaataaaacgaaaggctcagtcgaaagactgggcctttcgttttatctgttgtttgtcggtgaacgctctcctgagtaggacaaatccgccgggagcggatttgaacgttgcgaagcaacggcccggagggtggcgggcaggacgcccgccataaactgccaggcatcaaattaagcagaaggccatcctgacggatggcctttttgcgtttctacaaactcttcctgtcgtcatatctacaagccggcgcgccgggaaatgtgcgcggaacccctatttgtttatttttctaaatacattcaaatatgtatccgctcatgagacaataaccctgataaatgcttcaataatattgaaaaaggaagagtatgagtattcaacatttccgtgtcgcccttattcccttttttgcggcattttgccttcctgtttttgctcacccagaaacgctggtgaaagtaaaagatgctgaagatcagttgggtgcacgagtgggttacatcgaactggatctcaacagcggtaagatccttgagagttttcgccccgaagaacgttttccaatgatgagcacttttaaagttctgctatgtggcgcggtattatcccgtgttgacgccgggcaagagcaactcggtcgccgcatacactattctcagaatgacttggttgagtactcaccagtcacagaaaagcatcttacggatggcatgacagtaagagaattatgcagtgctgcaataaccatgagtgataacactgcggccaacttacttctgacaacgatcggaggaccgaaggagctaaccgcttttttgcacaacatgggggatcatgtaactcgccttgatcgttgggaaccggagctgaatgaagccataccaaacgacgagcgtgacaccacgatgcctgcagcaatggcaacaacgttgcgcaaactattaactggcgaactacttactctagcttcccggcaacaattaatagactggatggaggcggataaagttgcaggaccacttctgcgctcggcccttccggctagctggtttattgctgataaatctggagccggtgagcgtgggtctcgcggtatcattgcagcactggggccagatggtaagccctcccgtatcgtagttatctacacgacggggagtcaggcaactatggatgaacgaaatagacagatcgctgagataggtgcctcactgattaagcattggtaactgcagaccaagtttactcatatatactttagattgatttaaaacttcatttttaatttaaaaggatctaggtgaagatcctttttgataatctcatgaccaaaatcccttaacgtgagttttcgttccactgagcgtcagaccccgtagaaaagatcaaaggatcttcttgagatcctttttttctgcgcgtaatctgctgcttgcaaacaaaaaaaccaccgctaccagcggtggtttgtttgccggatcaagagctaccaactctttttccgaaggtaactggcttcagcagagcgcagataccaaatactgtccttctagtgtagccgtagttaggccaccacttcaagaactctgtagcaccgcctacatacctcgctctgctaatcctgttaccagtggctgctgccagtggcgataagtcgtgtcttaccgggttggactcaagacgatagttaccggataaggcgcagcggtcgggctgaacggggggttcgtgcacacagcccagcttggagcgaacgacctacaccgaactgagatacctacagcgtgagctatgagaaagcgccacgcttcccgaagggagaaaggcggacaggtatccggtaagcggcagggtcggaacaggagagcgcacgagggagcttccagggggaaacgcctggtatctttatagtcctgtcgggtttcgccacctctgacttgagcgtcgatttttgtgatgctcgtcaggggggcggagcctatggaaaaacgccagcaacgcggcctttttacggttcctggccttttgctgg

SEQ ID NO: 36 - DNA, 7565 bp, Artificial
  Synthetic
agacttagggaccctgcggccgccattaattcctaatttttgttgacactctatcattgatagagttattttaccactccctatcagtgatagagaaaagtgaaatgaatagaccggccgctgagaaaaagcgaagcggcactgctctttaacaatttatcagacaatctgtgtgggcactcgaagatacggattcttgacgtcgcaagacgaaaaatgaataccaagtctcaagagtgaacacgtaattcattacgaagtttaattctttgagcatcaaacttttaaattgaagagtttgatcatggctcagattgaacgctggcggcaggcctaacacatgcaagtcgaacggtaacaggaagcagcttgctgcttcgctgacgagtggcggacgggtgagtaatgtctgggaaactgcctgatggagggggataactactggaaacggtggctaataccgcataacgtcgcaagaccaaagagggggaccttcgggcctcttgccatcagatgtgcccagatgggattagctagttggtgaggtaacggctcaccaaggcgacgatccctagctggtctgagaggatgaccagccacactggaactgagacacggtccagactcctacgggaggcagcagtggggaatattgcacaatgggcgcaagcctgatgcagccatgccgcgtgtatgaagaaggccttcgggttgtaaagtactttcagcggggaggaaggtgttgtggttaataaccgcagcaattgacgttacccgcagaagaagcaccggctaactccgtgccagcagccgcggtaatacggagggtgcaagcgttaatcggaattactgggcgtaaagcgcacgcaggcggtctgtcaagtcggatgtgaaatccccgggctcaacctgggaactgcattcgaaactggcaggcttgagtcttgtagaggggggtagaattccaggtgtagcggtgaaatgcgtagagatctggaggaataccggtggcgaaggcggccccctggacaaagactgacgctcaggtgcgaaagcgtggggagcaaacaggattagataccctggtagtccacgccgtaaacgatgtctacttggaggttgtgcccttgaggcgtggcttccggagctaacgcgttaagtagaccgcctggggagtacggccgcaaggttaaaactcaaatgaattgacgggggcccgcacaagcggtggagcatgtggtttaattcgatgcaacgcgaagaaccttacctggtcttgacatccacagaactttccagagatggattggtgccttcgggaactgtgagacaggtgctgcatggctgtcgtcagctcgtgttgtgaaatgttgggttaagtcccgcaacgagcgcaacccttatcctttgttgccagcgattaggtcgggaactcaaaggagactgccagtgataaactggaggaaggtggggatgacgtcaagtcatcatggcccttacgaccagggctacacacgtgctacaatggcgcatacaaagagaagcgacctcgcgagagcaagcggacctcataaagtgcgtcgtagtccggattggagtctgcaactcgactccatgaagtcggaatcgctagtaatcgtggatcagaatgccacggtgaatacgttcccgggccttgtacacaccgcccgtcacaccatgggagtgggttgcaaaagaagtaggtagcttaaccttcgggagggcgcttaccactttgtgattcatgactggggtgaagtcgtaacaaggtaaccgtaggggaaacctgcggttggatcatgtggttaccttaaagaagcgtactttgaagtgctcacacagattgtctgatgaaaagtgaatagcaaggcgtcttgcgattgagacttcagtgtccccttcgtctagaggcccaggacaccgccctttcacggcggtaacaggggttcgaatcccctaggggacgccagcgttcaaactgatgaggtcaaacctccaggggacgccacttgctggtttgtgagtgaaagtcacctgccttaatatctcaaaactgacttacgagtcacgtttgagatatttgctctttaaaaatctggatcaagctgaaaattgaaacacagaacaacgaaagttgttcgtgagtctctcaaattttcgcaacacgatgatgaatcgtaagaaacatcttcgggttgtgaggttaagcgactaagcgtacacggtggatgccctggcagtcagaggcgatgaagggcgtgctaatctgcgataagcgccggtaaggtgatatgaaccgttataaccggcgatacccgaatggggaaacccagtgtgattcgtcacactatcattaactgaatccataggttaatgaggcgaaccgggggaactgaaacatctaagtaccccgaggaaaagaaatcaaccgagattcccccagtagcggcgagcgaacggggaggagcccagagcctgaatcagcatgtgtgttagtggaagcgtctggaaaggtgcgcgatacagggtgacagccccgtacacaaaagcgcatgtgctgtgagctcgatgagtagggcgggacacgtggtatcctgtctgaatatggggggaccatcctccaaggctaaatactcctgactgaccgatagtgaaccagtaccgtgagggaaaggcgaaaagaaccccggcgaggggagtgaaaaagaacctgaaaccgtgtacgtacaagcagtgggagcacaggtttacctgtgtgactgcgtaccttttgtataatgggtcagcgacttatattctgtagcaaggttaaccgtataggggagccgtagggaaaccgagtcttaaccgggcgttaagttgcagggtatagacccgaaacccggtgatctagccatgggcaggttgaaggttgggtaacactaactggaggaccgaaccgactaatgttgaaaaattagcggatgacctgtggctgggggtgaaaggccaatcaaaccgggagatagctggttctccccgaaagctatttaggtagcgcctcgtgaattcatctccgggggtagagcactgtttcggctagggggccatcccggcttaccaacccgatgcaaactgcgaataccggagaatgttatcacgggagacacacggcgggtgctaacgtccgtcgtgaagagggaaacaacccagaccgccagctaaggtcccaaagtcatggttaagtgggaaacgatgtgggaaggcccagacagccaggatgttggcttagaagcagccatcatttaaagaaagcgtaatagctcactggtcgagtcggcctgcgcggaagatgtaacggggctaaaccatgcaccgaagctgcggcagcgaacgtatcacccaagacaactttacggagttgacgattgacggagcgaagcgacgtcaaagcgttcattaaagtcgagttggcttagggatacgttcgttgggtaggggagcgttctgtaagcctgtgaaggtgtgtcgtgaggcatgctggaggtatcagaagtgcgaatgctgacataagtaacgataaagcgggtgaaaagcccgctcgccggaagaccaagggttcctgtccaacgttaatcggggcagggtgagtcgacccctaaggcgaggccgaaaggcgtagtcgatgggaaacgggttaatattcccgtacttggtgttactgcgaaggggggacggagaaggctatgttggccgggcgacggttgtcccggtttaagcgtgtaggtgtgtgttccaggtaaatccggttcactttaacactgaggcgtgacgacgaggcactacggtgctgaagcaacaaatgccctgcttccaggaaaagcctctaagcatcaggtaacacgaaatcgtaccccaaaccgacacaggtggtcaggtagagaataccaaggcgcttgagagaactcgggtgaaggaactaggcaaaatggtgccgtaacttcgggagaaggcacgctgacacgtaggtgaagtgatttactcatggagctgaagtcagtcgaagataccagctggctgcaactgtttattaaaaacacagcactgtgcaaacacgaaagtggacgtatacggtgtgacgcctgcccggtgccggaaggttaattgatggggtcagcgcaagcgaagctcctgatcgaagccccggtaaacggcggccgtaactataacggtcctaaggtagcgaaattccttgtcgggtaagttccgacctgcacgaatggcgtaatgatggccaggctgtctccacccgagactcagtgaaattgaactcgctgtgaagatgcagtgtacccgcggcaagacggaaagaccccgtgaacctttactatagcttgacactgaacattgagccttgatgtgtaggataggtgggaggctttgaagtgtggacgccagtctgcatggagccgaccttgaaataccaccctttaatgtttgatgttctaacgtggacccgtaatccgggttgcggacagtgtctggtgggtagtttgactggggcggtctcctcctaaagagtaacggaggagcacgaaggttggctaatcctggtcggacatcaggaggttagtgcaatggcataagccagcttgactgcgagcgtgacggcgcgagcaggtgcgaaagcaggtcatagtgatccggtggttctgaatggaagggccatcgctcaacggataaaaggtactccggggataacaggctgataccgcccaagagttcatatcgacggcggtgtttggcacctcgatgtcggctcatcacatcctggggctgaagtaggtcccaagggtatggctgttcgccatttaaagtggtacgcgagctgggtttagaacgtcgtgagacagttcggtccctatctgccgtgggcgctggagaactgaggggggctgctcctagtacgagaggaccggagtggacgcatcactggtgttcgggttgtcatgccaatggcactgcccggtagctaaatgcggaagagataagtgctgaaagcatctaagcacgaaacttgccccgagatgagttctccctgagacttagagtctcctgaaggaacgttgaagacgacgacgttgataggccgggtgtgtaagcgcagcgatgcgttgagctaaccggtactaatgaaccgtgaggcttaaccttacaacgccgaagatgttttggcggttaagagaagattttcagcactgattccggattttcgggaacgaaagattttacgctgaggcaaggcggcaaatgaaggaaaggaaggagcatacagaagtatgtgactgactttgcgaatgcagccaacgcagcatcggtgtaaaagattcgtttctggcaacagaatttgcctggcggccgtagcgcggtggtcccacctgaccccatgccgaactcagaagtgaaacgccgtagcgccgatggtagtgtggggtctccccatgcgagagtagggaactgccaggcatcaaattaagcaaaaggctcagtcgaaagactgggccttttgttttatctgtggtctgtcggtgagcactctcctgaggaggagaaatccgccgggagcggatttgaacgttgcgcagcaacggcccggagggtggcgggcaggacgcccgccataaactgccaggcatcaaacaagtgaagaagcccgtccgtcaggacgggcttttttgcgtgtgcggtaactgtaaaaatgtaggcctgataagcgcaggcgcgccgggaaatgtgcgcggaacccctatttgtttatttttctaaatacattcaaatatgtatccgctcatgagacaataaccctgataaatgcttcaataatattgaaaaaggaagagtatgagtattcaacatttccgtgtcgcccttattcccttttttgcggcattttgccttcctgtttttgctcacccagaaacgctggtgaaagtaaaagatgctgaagatcagttgggtgcacgagtgggttacatcgaactggatctcaacagcggtaagatccttgagagttttcgccccgaagaacgttttccaatgatgagcacttttaaagttctgctatgtggcgcggtattatcccgtgttgacgccgggcaagagcaactcggtcgccgcatacactattctcagaatgacttggttgagtactcaccagtcacagaaaagcatcttacggatggcatgacagtaagagaattatgcagtgctgcaataaccatgagtgataacactgcggccaacttacttctgacaacgatcggaggaccgaaggagctaaccgcttttttgcacaacatgggggatcatgtaactcgccttgatcgttgggaaccggagctgaatgaagccataccaaacgacgagcgtgacaccacgatgcctgcagcaatggcaacaacgttgcgcaaactattaactggcgaactacttactctagcttcccggcaacaattaatagactggatggaggcggataaagttgcaggaccacttctgcgctcggcccttccggctagctggtttattgctgataaatctggagccggtgagcgtgggtctcgcggtatcattgcagcactggggccagatggtaagccctcccgtatcgtagttatctacacgacggggagtcaggcaactatggatgaacgaaatagacagatcgctgagataggtgcctcactgattaagcattggtaactgcagaccaagtttactcatatatactttagattgatttaaaacttcatttttaatttaaaaggatctaggtgaagatcctttttgataatctcatgaccaaaatcccttaacgtgagttttcgttccactgagcgtcagaccccgtagaaaagatcaaaggatcttcttgagatcctttttttctgcgcgtaatctgctgcttgcaaacaaaaaaaccaccgctaccagcggtggtttgtttgccggatcaagagctaccaactctttttccgaaggtaactggcttcagcagagcgcagataccaaatactgtccttctagtgtagccgtagttaggccaccacttcaagaactctgtagcaccgcctacatacctcgctctgctaatcctgttaccagtggctgctgccagtggcgataagtcgtgtcttaccgggttggactcaagacgatagttaccggataaggcgcagcggtcgggctgaacggggggttcgtgcacacagcccagcttggagcgaacgacctacaccgaactgagatacctacagcgtgagctatgagaaagcgccacgcttcccgaagggagaaaggcggacaggtatccggtaagcggcagggtcggaacaggagagcgcacgagggagcttccagggggaaacgcctggtatctttatagtcctgtcgggtttcgccacctctgacttgagcgtcgatttttgtgatgctcgtcaggggggcggagcctatggaaaaacgccagcaacgcggcctttttacggttcctggccttttgctgg

SEQ ID NO: 37 - DNA, 7494 bp, Artificial
  Synthetic
agacttagggaccctgcggccgccattaattcctaatttttgttgacactctatcattgatagagttattttaccactccctatcagtgatagagaaaagtgaaatgaatagaccggccgctgagaaaaagcgaagcggctctttaacaatttatcagacaatctgtgtgggcactcgaagatacggattcttaacgtcgcaagacgaaaaatgaataccaagtctcttgagtgaacatacgtaattcattacgaagtttaattcacgagcatcaaacttaaattgaagagtttgatcatggctcagattgaacgctggcggcaggcctaacacatgcaagtcgaacggtagcacagagagcttgctctcgggtgacgagtggcggacgggtgagtaatgtctgggaaactgcccgatggagggggataactactggaaacggtagctaataccgcataacgtcgcaagaccaaagagggggaccttcgggcctcttgccatcggatgtgcccagatgggattagctagtaggtggggtaacggctcacctaggcgacgatccctagctggtctgagaggatgaccagccacactggaactgagacacggtccagactcctacgggaggcagcagtggggaatattgcacaatgggcgcaagcctgatgcagccatgccgcgtgtatgaagaaggccttcgggttgtaaagtactttcagcgaggaggaaggcgttgtggttaataaccgcaacgattgacgttactcgcagaagaagcaccggctaactccgtgccagcagccgcggtaatacggagggtgcaagcgttaatcggaattactgggcgtaaagcgcacgcaggcggtctgtcaagtcggatgtgaaatccccgggctcaacctgggaactgcatccgaaactggcaggctagagtcttgtagaggggggtagaattccaggtgtagcggtgaaatgcgtagagatctggaggaataccggtggcgaaggcggccccctggacaaagactgacgctcaggtgcgaaagcgtggggagcaaacaggattagataccctggtagtccacgccgtaaacgatgtcgacttggaggttgtgcccttgaggcgtggcttccggagctaacgcgttaagtcgaccgcctggggagtacggccgcaaggttaaaactcaaatgaattgacgggggcccgcacaagcggtggagcatgtggtttaattcgatgcaacgcgaagaaccttacctactcttgacatccagagaacttagcagagatgctttggtgccttcgggaactctgagacaggtgctgcatggctgtcgtcagctcgtgttgtgaaatgttgggttaagtcccgcaacgagcgcaacccttatcctttgttgccagcggtccggccgggaactcaaaggagactgccagtgataaactggaggaaggtggggatgacgtcaagtcatcatggcccttacgagtagggctacacacgtgctacaatggcatatacaaagagaagcgacctcgcgagagcaagcggacctcataaagtatgtcgtagtccggattggagtctgcaactcgactccatgaagtcggaatcgctagtaatcgtggatcagaatgccacggtgaatacgttcccgggccttgtacacaccgcccgtcacaccatgggagtgggttgcaaaagaagtaggtagcttaaccttcgggagggcgcttaccactttgtgattcatgactggggtgaagtcgtaacaaggtaaccgtaggggaacctgcggttggatcacctccttaccttaaagaacctgcctttgtagtgctcacacagattgtctgatgaaaagtaaatagcaaggcgtcttgcgattgagacttcagtgtccccttcgtctagaggcccaggacaccgccctttcacggcggtaacaggggttcgaatcccctaggggacgccacttgctggtatgtgtgagtgaaagtcgccgacctcaatatctcaaaacttaccttcgggtgaagtttgagatatttgctctttaaaaatctggatcaagctgaaaattgaaacgacacactgtttcatttctccgtaataagaaatgaaaaatggtgtgttcgagtctctcaaatttttgcaagtcgatgatgaatcgaaagaaacatcttcgggttgtgaggttaagcgactaagcgtacacggtggatgccctggcagtcagaggcgatgaaggacgtgctaatctgcgataagcgtcggtaaggtgatatgaaccgttataaccggcgatttccgaatggggaaacccagtgtgattcgtcacactatcgttaactgaatacataggttaacgaagcgaaccgggggaactgaaacatctaagtaccccgaggaaaagaaatcaaccgagattcccccagtagcggcgagcgaacggggagcagcccagagtctgaatcagcttgtgtgttagtggaacggtctggaaagtccgacggtacagggtgatagtcccgtacaccaaaatgcacaggttgtgaactcgaagagtagggcgggacacgtggtatcctgtctgaatatggggggaccatcctccaaggctaaatactcctgactgaccgatagtgaaccagtaccgtgagggaaaggcgaaaagaaccccggcgaggggagtgaaaaagaacctgaaaccgtgtacgtacaagcagtgggagcctctttatggggtgactgcgtaccttttgtataatgggtcagcgacttatattctgtagcaaggttaaccgtataggggagccgaagggaaaccgagtcttaactgggcgttaagttgcagggtatagacccgaaacccggtgatctagccatgggcaggttgaaggttgggtaacactaactggaggaccgaaccgactaatgttgaaaaattagcggatgacttgtggctgggggtgaaaggccaatcaaaccgggagatagctggttctccccgaaagctatttaggtagcgcctcgtgaactcatcttcgggggtagagcactgtttcggctagggggtcatcccgacttaccaacccgatgcaaactgcgaataccgaagaatgttatcacgggagacacacggcgggtgctaacgtccgtcgtgaagagggaaacaacccagaccgccagctaaggtcccaaagtcatggttaagtgggaaacgatgtgggaaggcacagacagccaggatgttggcttagaagcagccatcatttaaagaaagcgtaatagctcactggtcgagtcggcctgcgcggaagatgtaacggggctaaaccatgcaccgaagctgcggcagcgacactatgtgttgttgggtaggggagcgttctgtaagccgttgaaggtgtgctgtgaggcatgctggaggtatcagaagtgcgaatgctgacataagtaacgataatgcaggtgaaaaacccgcacgccggaagaccaagggttcctgtccaacgttaatcggggcagggtgagtcgacccctaaggcgaggccgaaaggcgtagtcgatgggaaacaggttaatattcctgtacttggtgttactgcgaaggggggacggagaaggctatgttagccgggcgacggttgtcccggtttaagcatgtaggcggaggttccaggtaaatccggtacctttttaacgctgaggtgtgatgacgaggcactacggtgctgaagtaacaaatgccctgcttccaggaaaagcctctaagcatcaggtaacacgaaatcgtaccccaaaccgacacaggtggtcaggtagagaataccaaggcgcttgagagaactcgggtgaaggaactaggcaaaatggtgccgtaacttcgggagaaggcacgctgatatgtaggtgaagtgatttactcatggagctgaaatcagtcgaagataccagctggctgcaactgtttattaaaaacacagcactgtgcaaacacgaaagtggacgtatacggtgtgacgcctgcccggtgccggaaggttaattgatggggttatccgtaaggagaagctcttgatcgaagccccggtaaacggcggccgtaactataacggtcctaaggtagcgaaattccttgtcgggtaagttccgacctgcacgaatggcgtaatgatggccaggctgtctccacccgagactcagtgaaattgaactcgctgtgaagatgcagtgtacccgcggcaagacggaaagaccccgtgaacctttactatagcttgacactgaacactggtccttgatgtgtaggataggtgggaggctttgaagtgtggacgccagtctgcatggagccatccttgaaataccaccctttaatggctggtgttctaacgtggacccgttacccgggttgcggacagtgtctggtgggtagtttgactggggcggtctcctcctaaagagtaacggaggagcacgaaggttagctaatcctggtcggacatcaggaggttagtgcaaaggcataagctagcttgactgcgagagtgacggctcgagcaggtgcgaaagcaggtcttagtgatccggtggttctgaatggaagggccatcgctcaacggataaaaggtactccggggataacaggctgataccgcccaagagttcatatcgacggcggtgtttggcacctcgatgtcggctcatcacatcctggggctgaagtaggtcccaagggtatggctgttcgccatttaaagtggtacgcgagctgggtttagaacgtcgtgagacagttcggtccctatctgccgtgggcgctggagaattgaggggggctgctcctagtacgagaggaccggagtggacgcatcactggtgttcgggttgtcatgccaatggcattgcccggtagctaaatgcggaagagataagtgctgaaagcatctaagcacgaaacttgccccgagatgagttctccctgagactataagtctcctgaaggaacgttgaagacgacgacgttgataggtcgggtgtgtaagtgtagcgatacattgagctaaccgatactaatgaaccgtgaggcttaaccttacaacgccgaagatgttttggcgaaagacagacatcatattcagcttgatacagattacatcagaacgcataaagtggtctgataacagaatttgcctggcggctgtagcgcggtggtcccacctgaccccatgccgaactcagaagtgaaacgccgtagcgccgatggtagtgtggggtctccccatgcgagagtagggaactgccaggcatcaaattgcagtaaaccgggatgaagaatccgggtagtgacaaagaaattcggtggagcggtagttcagttggttagaatacctgcctgtcacgcagggggtcgcgggttcgagtcccgtccgttccgccacttattagaaaattaagcctgctactaagcaggcttaatgataaaaaaatttaggggcgtagctcagttggtagagcaccggtctccaaaaccgggtgtcgcgagttcgagtctctccgcccctgccagaaacaatccttagcattcttgctaaggattttttttatctgcaatttgcgcagtgccttccagttgttttattctcggcatccttgcccatattttctttaatcttccagaatattcgttctcagcagcgcgccgggaaatgtgcgcggaacccctatttgtttatttttctaaatacattcaaatatgtatccgctcatgagacaataaccctgataaatgcttcaataatattgaaaaaggaagagtatgagtattcaacatttccgtgtcgcccttattcccttttttgcggcattttgccttcctgtttttgctcacccagaaacgctggtgaaagtaaaagatgctgaagatcagttgggtgcacgagtgggttacatcgaactggatctcaacagcggtaagatccttgagagttttcgccccgaagaacgttttccaatgatgagcacttttaaagttctgctatgtggcgcggtattatcccgtgttgacgccgggcaagagcaactcggtcgccgcatacactattctcagaatgacttggttgagtactcaccagtcacagaaaagcatcttacggatggcatgacagtaagagaattatgcagtgctgcaataaccatgagtgataacactgcggccaacttacttctgacaacgatcggaggaccgaaggagctaaccgcttttttgcacaacatgggggatcatgtaactcgccttgatcgttgggaaccggagctgaatgaagccataccaaacgacgagcgtgacaccacgatgcctgcagcaatggcaacaacgttgcgcaaactattaactggcgaactacttactctagcttcccggcaacaattaatagactggatggaggcggataaagttgcaggaccacttctgcgctcggcccttccggctagctggtttattgctgataaatctggagccggtgagcgtgggtctcgcggtatcattgcagcactggggccagatggtaagccctcccgtatcgtagttatctacacgacggggagtcaggcaactatggatgaacgaaatagacagatcgctgagataggtgcctcactgattaagcattggtaactgcagaccaagtttactcatatatactttagattgatttaaaacttcatttttaatttaaaaggatctaggtgaagatcctttttgataatctcatgaccaaaatcccttaacgtgagttttcgttccactgagcgtcagaccccgtagaaaagatcaaaggatcttcttgagatcctttttttctgcgcgtaatctgctgcttgcaaacaaaaaaaccaccgctaccagcggtggtttgtttgccggatcaagagctaccaactctttttccgaaggtaactggcttcagcagagcgcagataccaaatactgtccttctagtgtagccgtagttaggccaccacttcaagaactctgtagcaccgcctacatacctcgctctgctaatcctgttaccagtggctgctgccagtggcgataagtcgtgtcttaccgggttggactcaagacgatagttaccggataaggcgcagcggtcgggctgaacggggggttcgtgcacacagcccagcttggagcgaacgacctacaccgaactgagatacctacagcgtgagctatgagaaagcgccacgcttcccgaagggagaaaggcggacaggtatccggtaagcggcagggtcggaacaggagagcgcacgagggagcttccagggggaaacgcctggtatctttatagtcctgtcgggtttcgccacctctgacttgagcgtcgatttttgtgatgctcgtcaggggggcggagcctatggaaaaacgccagcaacgcggcctttttacggttcctggccttttgctgg

SEQ ID NO: 38 - DNA, 7418 bp, Artificial
  Synthetic
agacttagggaccctgcggccgccattaattcctaatttttgttgacactctatcattgatagagttattttaccactccctatcagtgatagagaaaagtgaaatgaatagaccggccgctgagaaaaagcgaagcggcactgctctttaacaatttatcagacaatctgtgtgggcactcgaagatacggattcttaacgtcgcaagacgaaaaatgaataccaagtctcaagagtgaacacgtaattcattacgaagtttaattctttgagcgtcaaacttttaaattgaagagtttgatcatggctcagattgaacgctggcggcaggcctaacacatgcaagtcgaacggtagcacagagagcttgctctcgggtgacgagtggcggacgggtgagtaatgtctgggaaactgcccgatggagggggataactactggaaacggtagctaataccgcataacgtcgcaagaccaaagagggggaccttcgggcctcttgccatcggatgtgcccagatgggattagctagtaggtggggtaacggctcacctaggcgacgatccctagctggtctgagaggatgaccagccacactggaactgagacacggtccagactcctacgggaggcagcagtggggaatattgcacaatgggcgcaagcctgatgcagccatgccgcgtgtatgaagaaggccttcgggttgtaaagtactttcagcgaggaggaaggcgttgtggttaataaccgcaacgattgacgttactcgcagaagaagcaccggctaactccgtgccagcagccgcggtaatacggagggtgcaagcgttaatcggaattactgggcgtaaagcgcacgcaggcggtctgtcaagtcggatgtgaaatccccgggctcaacctgggaactgcatccgaaactggcaggctagagtcttgtagaggggggtagaattccaggtgtagcggtgaaatgcgtagagatctggaggaataccggtggcgaaggcggccccctggacaaagactgacgctcaggtgcgaaagcgtggggagcaaacaggattagataccctggtagtccacgccgtaaacgatgtcgacttggaggttgtgcccttgaggcgtggcttccggagctaacgcgttaagtcgaccgcctggggagtacggccgcaaggttaaaactcaaatgaattgacgggggcccgcacaagcggtggagcatgtggtttaattcgatgcaacgcgaagaaccttacctactcttgacatccagagaacttagcagagatgctttggtgccttcgggaactctgagacaggtgctgcatggctgtcgtcagctcgtgttgtgaaatgttgggttaagtcccgcaacgagcgcaacccttatcctttgttgccagcggtccggccgggaactcaaaggagactgccagtgataaactggaggaaggtggggatgacgtcaagtcatcatggcccttacgagtagggctacacacgtgctacaatggcatatacaaagagaagcgacctcgcgagagcaagcggacctcataaagtatgtcgtagtccggattggagtctgcaactcgactccatgaagtcggaatcgctagtaatcgtggatcagaatgccacggtgaatacgttcccgggccttgtacacaccgcccgtcacaccatgggagtgggttgcaaaagaagtaggtagcttaaccttcgggagggcgcttaccactttgtgattcatgactggggtgaagtcgtaacaaggtaaccgtaggggaacctgcggttggatcacctccttaccttaaagaagcgtactttgtagtgctcacacagattgtctgatagaaagtgaaaagcaaggcgtttacgcgttgggagtgaggctgaagagaataaggccgttcgctttctattaatgaaagctcaccctacacgaaaatatcacgcaacgcgtgataagcaattttcgtgtccccttcgtctagaggcccaggacaccgccctttcacggcggtaacaggggttcgaatcccctaggggacgccacttgctggtttgtgagtgaaagtcgccgaccttaatatctcaaaactcatcttcgggtgatgtttgagatatttgctctttaaaaatctggatcaagctgaaaattgaaacactgaacaacgagagttgttcgtgagtctctcaaattttcgcaacacgatgatgaatcgaaagaaacatcttcgggttgtgaggttaagcgactaagcgtacacggtggatgccctggcagtcagaggcgatgaaggacgtgctaatctgcgataagcgtcggtaaggtgatatgaaccgttataaccggcgatttccgaatggggaaacccagtgtgattcgtcacactatcgttaactgaatacataggttaacgaagcgaaccgggggaactgaaacatctaagtaccccgaggaaaagaaatcaaccgagattcccccagtagcggcgagcgaacggggagcagcccagagtctgaatcagcttgtgtgttagtggaacggtctggaaagtccgacggtacagggtgatagtcccgtacaccaaaatgcacaggttgtgaactcgaagagtagggcgggacacgtggtatcctgtctgaatatggggggaccatcctccaaggctaaatactcctgactgaccgatagtgaaccagtaccgtgagggaaaggcgaaaagaaccccggcgaggggagtgaaaaagaacctgaaaccgtgtacgtacaagcagtgggagcctctttatggggtgactgcgtaccttttgtataatgggtcagcgacttatattctgtagcaaggttaaccgtataggggagccgaagggaaaccgagtcttaactgggcgttaagttgcagggtatagacccgaaacccggtgatctagccatgggcaggttgaaggttgggtaacactaactggaggaccgaaccgactaatgttgaaaaattagcggatgacttgtggctgggggtgaaaggccaatcaaaccgggagatagctggttctccccgaaagctatttaggtagcgcctcgtgaactcatcttcgggggtagagcactgtttcggctagggggtcatcccgacttaccaacccgatgcaaactgcgaataccgaagaatgttatcacgggagacacacggcgggtgctaacgtccgtcgtgaagagggaaacaacccagaccgccagctaaggtcccaaagtcatggttaagtgggaaacgatgtgggaaggcacagacagccaggatgttggcttagaagcagccatcatttaaagaaagcgtaatagctcactggtcgagtcggcctgcgcggaagatgtaacggggctaaaccatgcaccgaagctgcggcagcgacactatgtgttgttgggtaggggagcgttctgtaagccgttgaaggtgtgctgtgaggcatgctggaggtatcagaagtgcgaatgctgacataagtaacgataatgcaggtgaaaaacccgcacgccggaagaccaagggttcctgtccaacgttaatcggggcagggtgagtcgacccctaaggcgaggccgaaaggcgtagtcgatgggaaacaggttaatattcctgtacttggtgttactgcgaaggggggacggagaaggctatgttagccgggcgacggttgtcccggtttaagcatgtaggcggaggttccaggtaaatccggtacctttttaacgctgaggtgtgatgacgaggcactacggtgctgaagtaacaaatgccctgcttccaggaaaagcctctaagcatcaggtaacacgaaatcgtaccccaaaccgacacaggtggtcaggtagagaataccaaggcgcttgagagaactcgggtgaaggaactaggcaaaatggtgccgtaacttcgggagaaggcacgctgatatgtaggtgaagtgatttactcatggagctgaaatcagtcgaagataccagctggctgcaactgtttattaaaaacacagcactgtgcaaacacgaaagtggacgtatacggtgtgacgcctgcccggtgccggaaggttaattgatggggttatccgtaaggagaagctcttgatcgaagccccggtaaacggcggccgtaactataacggtcctaaggtagcgaaattccttgtcgggtaagttccgacctgcacgaatggcgtaatgatggccaggctgtctccacccgagactcagtgaaattgaactcgctgtgaagatgcagtgtacccgcggcaagacggaaagaccccgtgaacctttactatagcttgacactgaacactggtccttgatgtgtaggataggtgggaggctttgaagtgtggacgccagtctgcatggagccatccttgaaataccaccctttaatggctggtgttctaacgtggacccgttacccgggttgcggacagtgtctggtgggtagtttgactggggcggtctcctcctaaagagtaacggaggagcacgaaggttagctaatcctggtcggacatcaggaggttagtgcaaaggcataagctagcttgactgcgagagtgacggctcgagcaggtgcgaaagcaggtcttagtgatccggtggttctgaatggaagggccatcgctcaacggataaaaggtactccggggataacaggctgataccgcccaagagttcatatcgacggcggtgtttggcacctcgatgtcggctcatcacatcctggggctgaagtaggtcccaagggtatggctgttcgccatttaaagtggtacgcgagctgggtttagaacgtcgtgagacagttcggtccctatctgccgtgggcgctggagaattgaggggggctgctcctagtacgagaggaccggagtggacgcatcactggtgttcgggttgtcatgccaatggcattgcccggtagctaaatgcggaagagataagtgctgaaagcatctaagcacgaaacttgccccgagatgagttctccctgagactataagtctcctgaaggaacgttgaagacgacgacgttgataggtcgggtgtgtaagtgtagcgatacattgagctaaccgatactaatgaaccgtgaggcttaaccttacaacgccgaagctgttttggcggatgagagaagattttcagcctgatacagattaaatcagaacgcagaagcggtctgataaaacagaattgcctggcggctgtagcgcggtggtcccacctgaccccatgccgaactcagaagtgaaacgccgtagcgccgatggtagtgtggggtctccccatgcgagagtagggaactgccaggcatcaaataaaacgaaaggctcagtcgaaagactgggcctttcgttttatctgttgtttgtcggtgaacgctctcctgagtaggacaaatccgccgggagcggatttgaacgttgcgaagcaacggcccggagggtggcgggcaggacgcccgccataaactgccaggcatcaaattaagcagaaggccatcctgacggatggcctttttgcgtttctacaaactcttcctgtcgtcatatctacaagccggcgcgccgggaaatgtgcgcggaacccttatttgtttatttttctaaatacattcaaatatgtatccgctcatgagacaataaccctgataaatgcttcaataatattgaaaaaggaagagtatgagtattcaacatttccgtgtcgcccttattcccttttttgcggcattttgccttcctgtttttgctcacccagaaacgctggtgaaagtaaaagatgctgaagatcagttgggtgcacgagtgggttacatcgaactggatctcaacagcggtaagatccttgagagttttcgccccgaagaacgttttccaatgatgagcacttttaaagttctgctatgtggcgcggtattatcccgtgttgacgccgggcaagagcaactcggtcgccgcatacactattctcagaatgacttggttgagtactcaccagtcacagaaaagcatcttacggatggcatgacagtaagagaattatgcagtgctgcaataaccatgagtgataacactgcggccaacttacttctgacaacgatcggaggaccgaaggagctaaccgcttttttgcacaacatgggggatcatgtaactcgccttgatcgttgggaaccggagctgaatgaagccataccaaacgacgagcgtgacaccacgatgcctgcagcaatggcaacaacgttgcgcaaactattaactggcgaactacttactctagcttcccggcaacaattaatagactggatggaggcggataaagttgcaggaccacttctgcgctcggcccttccggctagctggtttattgctgataaatctggagccggtgagcgtgggtctcgcggtatcattgcagcactggggccagatggtaagccctcccgtatcgtagttatctacacgacggggagtcaggcaactatggatgaacgaaatagacagatcgctgagataggtgcctcactgattaagcattggtaactgcagaccaagtttactcatatatactttagattgatttaaaacttcatttttaatttaaaaggatctaggtgaagatcctttttgataatctcatgaccaaaatcccttaacgtgagttttcgttccactgagcgtcagaccccgtagaaaagatcaaaggatcttcttgagatcctttttttctgcgcgtaatctgctgcttgcaaacaaaaaaaccaccgctaccagcggtggtttgtttgccggatcaagagctaccaactctttttccgaaggtaactggcttcagcagagcgcagataccaaatactgtccttctagtgtagccgtagttaggccaccacttcaagaactctgtagcaccgcctacatacctcgctctgctaatcctgttaccagtggctgctgccagtggcgataagtcgtgtcttaccgggttggactcaagacgatagttaccggataaggcgcagcggtcgggctgaacggggggttcgtgcacacagcccagcttggagcgaacgacctacaccgaactgagatacctacagcgtgagctatgagaaagcgccacgcttcccgaagggagaaaggcggacaggtatccggtaagcggcagggtcggaacaggagagcgcacgagggagcttccagggggaaacgcctggtatctttatagtcctgtcgggtttcgccacctctgacttgagcgtcgatttttgtgatgctcgtcaggggggcggagcctatggaaaaacgccagcaacgcggcctttttacggttcctggccttttgctgg

SEQ ID NO: 39 - DNA, 7494 bp, Artificial
  Synthetic
agacttagggaccctgcggccgccattaattcctaatttttgttgacactctatcattgatagagttattttaccactccctatcagtgatagagaaaagtgaaatgaatagaccggccgctgagaaaaagcgaagcggctctttaacaatttatcagacaatctgtgtgggcactcgaagatacggattcttaacgtcgcaagacgaaaaatgaataccaagtctcttgagtgaacatacgtaattcattacgaagtttaattcacgagcatcaaacttaaattgaagagtttgatcatggctcagattgaacgctggcggcaggcctaacacatgcaagtcgaacggtagcacagagagcttgctctcgggtgacgagtggcggacgggtgagtaatgtctgggaaactgcccgatggagggggataactactggaaacggtagctaataccgcataacgtcgcaagaccaaagagggggaccttcgggcctcttgccatcggatgtgcccagatgggattagctagtaggtggggtaacggctcacctaggcgacgatccctagctggtctgagaggatgaccagccacactggaactgagacacggtccagactcctacgggaggcagcagtggggaatattgcacaatgggcgcaagcctgatgcagccatgccgcgtgtatgaagaaggccttcgggttgtaaagtactttcagcgaggaggaaggcgttgtggttaataaccgcaacgattgacgttactcgcagaagaagcaccggctaactccgtgccagcagccgcggtaatacggagggtgcaagcgttaatcggaattactgggcgtaaagcgcacgcaggcggtctgtcaagtcggatgtgaaatccccgggctcaacctgggaactgcatccgaaactggcaggctagagtcttgtagaggggggtagaattccaggtgtagcggtgaaatgcgtagagatctggaggaataccggtggcgaaggcggccccctggacaaagactgacgctcaggtgcgaaagcgtggggagcaaacaggattagataccctggtagtccacgccgtaaacgatgtcgacttggaggttgtgcccttgaggcgtggcttccggagctaacgcgttaagtcgaccgcctggggagtacggccgcaaggttaaaactcaaatgaattgacgggggcccgcacaagcggtggagcatgtggtttaattcgatgcaacgcgaagaaccttacctactcttgacatccagagaacttagcagagatgctttggtgccttcgggaactctgagacaggtgctgcatggctgtcgtcagctcgtgttgtgaaatgttgggttaagtcccgcaacgagcgcaacccttatcctttgttgccagcggtccggccgggaactcaaaggagactgccagtgataaactggaggaaggtggggatgacgtcaagtcatcatggcccttacgagtagggctacacacgtgctacaatggcatatacaaagagaagcgacctcgcgagagcaagcggacctcataaagtatgtcgtagtccggattggagtctgcaactcgactccatgaagtcggaatcgctagtaatcgtggatcagaatgccacggtgaatacgttcccgggccttgtacacaccgcccgtcacaccatgggagtgggttgcaaaagaagtaggtagcttaaccttcgggagggcgcttaccactttgtgattcatgactggggtgaagtcgtaacaaggtaaccgtaggggaacctgcggttggatcatgtggttaccttaaagaacctgcctttgtagtgctcacacagattgtctgatgaaaagtaaatagcaaggcgtcttgcgattgagacttcagtgtccccttcgtctagaggcccaggacaccgccctttcacggcggtaacaggggttcgaatcccctaggggacgccacttgctggtatgtgtgagtgaaagtcgccgacctcaatatctcaaaacttaccttcgggtgaagtttgagatatttgctctttaaaaatctggatcaagctgaaaattgaaacgacacactgtttcatttctccgtaataagaaatgaaaaatggtgtgttcgagtctctcaaatttttgcaagtcgatgatgaatcgaaagaaacatcttcgggttgtgaggttaagcgactaagcgtacacggtggatgccctggcagtcagaggcgatgaaggacgtgctaatctgcgataagcgtcggtaaggtgatatgaaccgttataaccggcgatttccgaatggggaaacccagtgtgattcgtcacactatcgttaactgaatacataggttaacgaagcgaaccgggggaactgaaacatctaagtaccccgaggaaaagaaatcaaccgagattcccccagtagcggcgagcgaacggggagcagcccagagtctgaatcagcttgtgtgttagtggaacggtctggaaagtccgacggtacagggtgatagtcccgtacaccaaaatgcacaggttgtgaactcgaagagtagggcgggacacgtggtatcctgtctgaatatggggggaccatcctccaaggctaaatactcctgactgaccgatagtgaaccagtaccgtgagggaaaggcgaaaagaaccccggcgaggggagtgaaaaagaacctgaaaccgtgtacgtacaagcagtgggagcctctttatggggtgactgcgtaccttttgtataatgggtcagcgacttatattctgtagcaaggttaaccgtataggggagccgaagggaaaccgagtcttaactgggcgttaagttgcagggtatagacccgaaacccggtgatctagccatgggcaggttgaaggttgggtaacactaactggaggaccgaaccgactaatgttgaaaaattagcggatgacttgtggctgggggtgaaaggccaatcaaaccgggagatagctggttctccccgaaagctatttaggtagcgcctcgtgaactcatcttcgggggtagagcactgtttcggctagggggtcatcccgacttaccaacccgatgcaaactgcgaataccgaagaatgttatcacgggagacacacggcgggtgctaacgtccgtcgtgaagagggaaacaacccagaccgccagctaaggtcccaaagtcatggttaagtgggaaacgatgtgggaaggcacagacagccaggatgttggcttagaagcagccatcatttaaagaaagcgtaatagctcactggtcgagtcggcctgcgcggaagatgtaacggggctaaaccatgcaccgaagctgcggcagcgacactatgtgttgttgggtaggggagcgttctgtaagccgttgaaggtgtgctgtgaggcatgctggaggtatcagaagtgcgaatgctgacataagtaacgataatgcaggtgaaaaacccgcacgccggaagaccaagggttcctgtccaacgttaatcggggcagggtgagtcgacccctaaggcgaggccgaaaggcgtagtcgatgggaaacaggttaatattcctgtacttggtgttactgcgaaggggggacggagaaggctatgttagccgggcgacggttgtcccggtttaagcatgtaggcggaggttccaggtaaatccggtacctttttaacgctgaggtgtgatgacgaggcactacggtgctgaagtaacaaatgccctgcttccaggaaaagcctctaagcatcaggtaacacgaaatcgtaccccaaaccgacacaggtggtcaggtagagaataccaaggcgcttgagagaactcgggtgaaggaactaggcaaaatggtgccgtaacttcgggagaaggcacgctgatatgtaggtgaagtgatttactcatggagctgaaatcagtcgaagataccagctggctgcaactgtttattaaaaacacagcactgtgcaaacacgaaagtggacgtatacggtgtgacgcctgcccggtgccggaaggttaattgatggggttatccgtaaggagaagctcttgatcgaagccccggtaaacggcggccgtaactataacggtcctaaggtagcgaaattccttgtcgggtaagttccgacctgcacgaatggcgtaatgatggccaggctgtctccacccgagactcagtgaaattgaactcgctgtgaagatgcagtgtacccgcggcaagacggaaagaccccgtgaacctttactatagcttgacactgaacactggtccttgatgtgtaggataggtgggaggctttgaagtgtggacgccagtctgcatggagccatccttgaaataccaccctttaatggctggtgttctaacgtggacccgttacccgggttgcggacagtgtctggtgggtagtttgactggggcggtctcctcctaaagagtaacggaggagcacgaaggttagctaatcctggtcggacatcaggaggttagtgcaaaggcataagctagcttgactgcgagagtgacggctcgagcaggtgcgaaagcaggtcttagtgatccggtggttctgaatggaagggccatcgctcaacggataaaaggtactccggggataacaggctgataccgcccaagagttcatatcgacggcggtgtttggcacctcgatgtcggctcatcacatcctggggctgaagtaggtcccaagggtatggctgttcgccatttaaagtggtacgcgagctgggtttagaacgtcgtgagacagttcggtccctatctgccgtgggcgctggagaattgaggggggctgctcctagtacgagaggaccggagtggacgcatcactggtgttcgggttgtcatgccaatggcattgcccggtagctaaatgcggaagagataagtgctgaaagcatctaagcacgaaacttgccccgagatgagttctccctgagactataagtctcctgaaggaacgttgaagacgacgacgttgataggtcgggtgtgtaagtgtagcgatacattgagctaaccgatactaatgaaccgtgaggcttaaccttacaacgccgaagatgttttggcgaaagacagacatcatattcagcttgatacagattacatcagaacgcataaagtggtctgataacagaatttgcctggcggctgtagcgcggtggtcccacctgaccccatgccgaactcagaagtgaaacgccgtagcgccgatggtagtgtggggtctccccatgcgagagtagggaactgccaggcatcaaattgcagtaaaccgggatgaagaatccgggtagtgacaaagaaattcggtggagcggtagttcagttggttagaatacctgcctgtcacgcagggggtcgcgggttcgagtcccgtccgttccgccacttattagaaaattaagcctgctactaagcaggcttaatgataaaaaaatttaggggcgtagctcagttggtagagcaccggtctccaaaaccgggtgtcgcgagttcgagtctctccgcccctgccagaaacaatccttagcattcttgctaaggattttttttatctgcaatttgcgcagtgccttccagttgttttattctcggcatccttgcccatattttctttaatcttccagaatattcgttctcagcagcgcgccgggaaatgtgcgcggaacccctatttgtttatttttctaaatacattcaaatatgtatccgctcatgagacaataaccctgataaatgcttcaataatattgaaaaaggaagagtatgagtattcaacatttccgtgtcgcccttattcccttttttgcggcattttgccttcctgtttttgctcacccagaaacgctggtgaaagtaaaagatgctgaagatcagttgggtgcacgagtgggttacatcgaactggatctcaacagcggtaagatccttgagagttttcgccccgaagaacgttttccaatgatgagcacttttaaagttctgctatgtggcgcggtattatcccgtgttgacgccgggcaagagcaactcggtcgccgcatacactattctcagaatgacttggttgagtactcaccagtcacagaaaagcatcttacggatggcatgacagtaagagaattatgcagtgctgcaataaccatgagtgataacactgcggccaacttacttctgacaacgatcggaggaccgaaggagctaaccgcttttttgcacaacatgggggatcatgtaactcgccttgatcgttgggaaccggagctgaatgaagccataccaaacgacgagcgtgacaccacgatgcctgcagcaatggcaacaacgttgcgcaaactattaactggcgaactacttactctagcttcccggcaacaattaatagactggatggaggcggataaagttgcaggaccacttctgcgctcggcccttccggctagctggtttattgctgataaatctggagccggtgagcgtgggtctcgcggtatcattgcagcactggggccagatggtaagccctcccgtatcgtagttatctacacgacggggagtcaggcaactatggatgaacgaaatagacagatcgctgagataggtgcctcactgattaagcattggtaactgcagaccaagtttactcatatatactttagattgatttaaaacttcatttttaatttaaaaggatctaggtgaagatcctttttgataatctcatgaccaaaatcccttaacgtgagttttcgttccactgagcgtcagaccccgtagaaaagatcaaaggatcttcttgagatcctttttttctgcgcgtaatctgctgcttgcaaacaaaaaaaccaccgctaccagcggtggtttgtttgccggatcaagagctaccaactctttttccgaaggtaactggcttcagcagagcgcagataccaaatactgtccttctagtgtagccgtagttaggccaccacttcaagaactctgtagcaccgcctacatacctcgctctgctaatcctgttaccagtggctgctgccagtggcgataagtcgtgtcttaccgggttggactcaagacgatagttaccggataaggcgcagcggtcgggctgaacggggggttcgtgcacacagcccagcttggagcgaacgacctacaccgaactgagatacctacagcgtgagctatgagaaagcgccacgcttcccgaagggagaaaggcggacaggtatccggtaagcggcagggtcggaacaggagagcgcacgagggagcttccagggggaaacgcctggtatctttatagtcctgtcgggtttcgccacctctgacttgagcgtcgatttttgtgatgctcgtcaggggggcggagcctatggaaaaacgccagcaacgcggcctttttacggttcctggccttttgctgg

SEQ ID NO: 40 - DNA, 7418 bp, Artificial
  Synthetic
agacttagggaccctgcggccgccattaattcctaatttttgttgacactctatcattgatagagttattttaccactccctatcagtgatagagaaaagtgaaatgaatagaccggccgctgagaaaaagcgaagcggcactgctctttaacaatttatcagacaatctgtgtgggcactcgaagatacggattcttaacgtcgcaagacgaaaaatgaataccaagtctcaagagtgaacacgtaattcattacgaagtttaattctttgagcgtcaaacttttaaattgaagagtttgatcatggctcagattgaacgctggcggcaggcctaacacatgcaagtcgaacggtagcacagagagcttgctctcgggtgacgagtggcggacgggtgagtaatgtctgggaaactgcccgatggagggggataactactggaaacggtagctaataccgcataacgtcgcaagaccaaagagggggaccttcgggcctcttgccatcggatgtgcccagatgggattagctagtaggtggggtaacggctcacctaggcgacgatccctagctggtctgagaggatgaccagccacactggaactgagacacggtccagactcctacgggaggcagcagtggggaatattgcacaatgggcgcaagcctgatgcagccatgccgcgtgtatgaagaaggccttcgggttgtaaagtactttcagcgaggaggaaggcgttgtggttaataaccgcaacgattgacgttactcgcagaagaagcaccggctaactccgtgccagcagccgcggtaatacggagggtgcaagcgttaatcggaattactgggcgtaaagcgcacgcaggcggtctgtcaagtcggatgtgaaatccccgggctcaacctgggaactgcatccgaaactggcaggctagagtcttgtagaggggggtagaattccaggtgtagcggtgaaatgcgtagagatctggaggaataccggtggcgaaggcggccccctggacaaagactgacgctcaggtgcgaaagcgtggggagcaaacaggattagataccctggtagtccacgccgtaaacgatgtcgacttggaggttgtgcccttgaggcgtggcttccggagctaacgcgttaagtcgaccgcctggggagtacggccgcaaggttaaaactcaaatgaattgacgggggcccgcacaagcggtggagcatgtggtttaattcgatgcaacgcgaagaaccttacctactcttgacatccagagaacttagcagagatgctttggtgccttcgggaactctgagacaggtgctgcatggctgtcgtcagctcgtgttgtgaaatgttgggttaagtcccgcaacgagcgcaacccttatcctttgttgccagcggtccggccgggaactcaaaggagactgccagtgataaactggaggaaggtggggatgacgtcaagtcatcatggcccttacgagtagggctacacacgtgctacaatggcatatacaaagagaagcgacctcgcgagagcaagcggacctcataaagtatgtcgtagtccggattggagtctgcaactcgactccatgaagtcggaatcgctagtaatcgtggatcagaatgccacggtgaatacgttcccgggccttgtacacaccgcccgtcacaccatgggagtgggttgcaaaagaagtaggtagcttaaccttcgggagggcgcttaccactttgtgattcatgactggggtgaagtcgtaacaaggtaaccgtaggggaacctgcggttggatcatgtggttaccttaaagaagcgtactttgtagtgctcacacagattgtctgatagaaagtgaaaagcaaggcgtttacgcgttgggagtgaggctgaagagaataaggccgttcgctttctattaatgaaagctcaccctacacgaaaatatcacgcaacgcgtgataagcaattttcgtgtccccttcgtctagaggcccaggacaccgccctttcacggcggtaacaggggttcgaatcccctaggggacgccacttgctggtttgtgagtgaaagtcgccgaccttaatatctcaaaactcatcttcgggtgatgtttgagatatttgctctttaaaaatctggatcaagctgaaaattgaaacactgaacaacgagagttgttcgtgagtctctcaaattttcgcaacacgatgatgaatcgaaagaaacatcttcgggttgtgaggttaagcgactaagcgtacacggtggatgccctggcagtcagaggcgatgaaggacgtgctaatctgcgataagcgtcggtaaggtgatatgaaccgttataaccggcgatttccgaatggggaaacccagtgtgattcgtcacactatcgttaactgaatacataggttaacgaagcgaaccgggggaactgaaacatctaagtaccccgaggaaaagaaatcaaccgagattcccccagtagcggcgagcgaacggggagcagcccagagtctgaatcagcttgtgtgttagtggaacggtctggaaagtccgacggtacagggtgatagtcccgtacaccaaaatgcacaggttgtgaactcgaagagtagggcgggacacgtggtatcctgtctgaatatggggggaccatcctccaaggctaaatactcctgactgaccgatagtgaaccagtaccgtgagggaaaggcgaaaagaaccccggcgaggggagtgaaaaagaacctgaaaccgtgtacgtacaagcagtgggagcctctttatggggtgactgcgtaccttttgtataatgggtcagcgacttatattctgtagcaaggttaaccgtataggggagccgaagggaaaccgagtcttaactgggcgttaagttgcagggtatagacccgaaacccggtgatctagccatgggcaggttgaaggttgggtaacactaactggaggaccgaaccgactaatgttgaaaaattagcggatgacttgtggctgggggtgaaaggccaatcaaaccgggagatagctggttctccccgaaagctatttaggtagcgcctcgtgaactcatcttcgggggtagagcactgtttcggctagggggtcatcccgacttaccaacccgatgcaaactgcgaataccgaagaatgttatcacgggagacacacggcgggtgctaacgtccgtcgtgaagagggaaacaacccagaccgccagctaaggtcccaaagtcatggttaagtgggaaacgatgtgggaaggcacagacagccaggatgttggcttagaagcagccatcatttaaagaaagcgtaatagctcactggtcgagtcggcctgcgcggaagatgtaacggggctaaaccatgcaccgaagctgcggcagcgacactatgtgttgttgggtaggggagcgttctgtaagccgttgaaggtgtgctgtgaggcatgctggaggtatcagaagtgcgaatgctgacataagtaacgataatgcaggtgaaaaacccgcacgccggaagaccaagggttcctgtccaacgttaatcggggcagggtgagtcgacccctaaggcgaggccgaaaggcgtagtcgatgggaaacaggttaatattcctgtacttggtgttactgcgaaggggggacggagaaggctatgttagccgggcgacggttgtcccggtttaagcatgtaggcggaggttccaggtaaatccggtacctttttaacgctgaggtgtgatgacgaggcactacggtgctgaagtaacaaatgccctgcttccaggaaaagcctctaagcatcaggtaacacgaaatcgtaccccaaaccgacacaggtggtcaggtagagaataccaaggcgcttgagagaactcgggtgaaggaactaggcaaaatggtgccgtaacttcgggagaaggcacgctgatatgtaggtgaagtgatttactcatggagctgaaatcagtcgaagataccagctggctgcaactgtttattaaaaacacagcactgtgcaaacacgaaagtggacgtatacggtgtgacgcctgcccggtgccggaaggttaattgatggggttatccgtaaggagaagctcttgatcgaagccccggtaaacggcggccgtaactataacggtcctaaggtagcgaaattccttgtcgggtaagttccgacctgcacgaatggcgtaatgatggccaggctgtctccacccgagactcagtgaaattgaactcgctgtgaagatgcagtgtacccgcggcaagacggaaagaccccgtgaacctttactatagcttgacactgaacactggtccttgatgtgtaggataggtgggaggctttgaagtgtggacgccagtctgcatggagccatccttgaaataccaccctttaatggctggtgttctaacgtggacccgttacccgggttgcggacagtgtctggtgggtagtttgactggggcggtctcctcctaaagagtaacggaggagcacgaaggttagctaatcctggtcggacatcaggaggttagtgcaaaggcataagctagcttgactgcgagagtgacggctcgagcaggtgcgaaagcaggtcttagtgatccggtggttctgaatggaagggccatcgctcaacggataaaaggtactccggggataacaggctgataccgcccaagagttcatatcgacggcggtgtttggcacctcgatgtcggctcatcacatcctggggctgaagtaggtcccaagggtatggctgttcgccatttaaagtggtacgcgagctgggtttagaacgtcgtgagacagttcggtccctatctgccgtgggcgctggagaattgaggggggctgctcctagtacgagaggaccggagtggacgcatcactggtgttcgggttgtcatgccaatggcattgcccggtagctaaatgcggaagagataagtgctgaaagcatctaagcacgaaacttgccccgagatgagttctccctgagactataagtctcctgaaggaacgttgaagacgacgacgttgataggtcgggtgtgtaagtgtagcgatacattgagctaaccgatactaatgaaccgtgaggcttaaccttacaacgccgaagctgttttggcggatgagagaagattttcagcctgatacagattaaatcagaacgcagaagcggtctgataaaacagaattgcctggcggctgtagcgcggtggtcccacctgaccccatgccgaactcagaagtgaaacgccgtagcgccgatggtagtgtggggtctccccatgcgagagtagggaactgccaggcatcaaataaaacgaaaggctcagtcgaaagactgggcctttcgttttatctgttgtttgtcggtgaacgctctcctgagtaggacaaatccgccgggagcggatttgaacgttgcgaagcaacggcccggagggtggcgggcaggacgcccgccataaactgccaggcatcaaattaagcagaaggccatcctgacggatggcctttttgcgtttctacaaactcttcctgtcgtcatatctacaagccggcgcgccgggaaatgtgcgcggaacccttatttgtttatttttctaaatacattcaaatatgtatccgctcatgagacaataaccctgataaatgcttcaataatattgaaaaaggaagagtatgagtattcaacatttccgtgtcgcccttattcccttttttgcggcattttgccttcctgtttttgctcacccagaaacgctggtgaaagtaaaagatgctgaagatcagttgggtgcacgagtgggttacatcgaactggatctcaacagcggtaagatccttgagagttttcgccccgaagaacgttttccaatgatgagcacttttaaagttctgctatgtggcgcggtattatcccgtgttgacgccgggcaagagcaactcggtcgccgcatacactattctcagaatgacttggttgagtactcaccagtcacagaaaagcatcttacggatggcatgacagtaagagaattatgcagtgctgcaataaccatgagtgataacactgcggccaacttacttctgacaacgatcggaggaccgaaggagctaaccgcttttttgcacaacatgggggatcatgtaactcgccttgatcgttgggaaccggagctgaatgaagccataccaaacgacgagcgtgacaccacgatgcctgcagcaatggcaacaacgttgcgcaaactattaactggcgaactacttactctagcttcccggcaacaattaatagactggatggaggcggataaagttgcaggaccacttctgcgctcggcccttccggctagctggtttattgctgataaatctggagccggtgagcgtgggtctcgcggtatcattgcagcactggggccagatggtaagccctcccgtatcgtagttatctacacgacggggagtcaggcaactatggatgaacgaaatagacagatcgctgagataggtgcctcactgattaagcattggtaactgcagaccaagtttactcatatatactttagattgatttaaaacttcatttttaatttaaaaggatctaggtgaagatcctttttgataatctcatgaccaaaatcccttaacgtgagttttcgttccactgagcgtcagaccccgtagaaaagatcaaaggatcttcttgagatcctttttttctgcgcgtaatctgctgcttgcaaacaaaaaaaccaccgctaccagcggtggtttgtttgccggatcaagagctaccaactctttttccgaaggtaactggcttcagcagagcgcagataccaaatactgtccttctagtgtagccgtagttaggccaccacttcaagaactctgtagcaccgcctacatacctcgctctgctaatcctgttaccagtggctgctgccagtggcgataagtcgtgtcttaccgggttggactcaagacgatagttaccggataaggcgcagcggtcgggctgaacggggggttcgtgcacacagcccagcttggagcgaacgacctacaccgaactgagatacctacagcgtgagctatgagaaagcgccacgcttcccgaagggagaaaggcggacaggtatccggtaagcggcagggtcggaacaggagagcgcacgagggagcttccagggggaaacgcctggtatctttatagtcctgtcgggtttcgccacctctgacttgagcgtcgatttttgtgatgctcgtcaggggggcggagcctatggaaaaacgccagcaacgcggcctttttacggttcctggccttttgctgg

SEQ ID NO: 41 - DNA, 7330 bp, Artificial
  Synthetic
agacttagggaccctgcggccgccattaattcctaatttttgttgacactctatcattgatagagttattttaccactccctatcagtgatagagaaaagtgaaatgaatagaccggccgctgagaaaaagcgaagcggccgcaactgctctttaacaatttatcagacaatctgtgtgggcactcaaagtgacatggattcttaatgtcttcggacaataaatgaataccaagtctctgagtgaacatacgtaattcattacgaagtttaattcacgagcatcaaacttaaattgaagagtttgatcatggctcagattgaacgctggcggcaggcctaacacatgcaagtcgagcggtagcacagagagcttgctctcgggtgacgagcggcggacgggtgagtaatgtctgggaaactgcctgatggagggggataactactggaaacggtagctaataccgcataacgtcgcaagaccaaagtgggggaccttcgggcctcatgccatcagatgtgcccagatgggattagctagtaggtggggtaatggctcacctaggcgacgatccctagctggtctgagaggatgaccagccacactggaactgagacacggtccagactcctacgggaggcagcagtggggaatattgcacaatgggcgcaagcctgatgcagccatgccgcgtgtatgaagaaggccttcgggttgtaaagtactttcagcgaggaggaaggcgttaaggttaataaccttggcgattgacgttactcgcagaagaagcaccggctaactccgtgccagcagccgcggtaatacggagggtgcaagcgttaatcggaattactgggcgtaaagcgcacgcaggcggtctgtcaagtcggatgtgaaatccccgggctcaacctgggaactgcattcgaaactggcaggctagagtcttgtagaggggggtagaattccaggtgtagcggtgaaatgcgtagagatctggaggaataccggtggcgaaggcggccccctggacaaagactgacgctcaggtgcgaaagcgtggggagcaaacaggattagataccctggtagtccacgccgtaaacgatgtcgacttggaggttgtgcccttgaggcgtggcttccggagctaacgcgttaagtcgaccgcctggggagtacggccgcaaggttaaaactcaaatgaattgacgggggcccgcacaagcggtggagcatgtggtttaattcgatgcaacgcgaagaaccttacctactcttgacatccagagaacttagcagagatgctttggtgccttcgggaactctgagacaggtgctgcatggctgtcgtcagctcgtgttgtgaaatgttgggttaagtcccgcaacgagcgcaacccttatcctttgttgccagcgattcggtcgggaactcaaaggagactgccagtgataaactggaggaaggtggggatgacgtcaagtcatcatggcccttacgagtagggctacacacgtgctacaatggcatatacaaagagaagcgacctcgcgagagcaagcggacctcataaagtatgtcgtagtccggattggagtctgcaactcgactccatgaagtcggaatcgctagtaatcgtagatcagaatgctacggtgaatacgttcccgggccttgtacacaccgcccgtcacaccatgggagtgggttgcaaaagaagtaggtagcttaaccttcgggagggcgcttaccactttgtgattcatgactggggtgaagtcgtaacaaggtaaccgtaggggaacctgcggttggatcacctccttaccttaaagaacctgcctttgtagtgctcacacagattgtctgatgaaagtagagaagcaaggcgtcttgcgattgagacttcagtgtccccttcgtctagaggcccaggacaccgccctttcacggcggtaacaggggttcgaatcccctaggggacgccacttgctggttcgtgagtgaaagacgcgtgccgatatatctcaaaactcatcttcgggtgacgtttgagatatttgctctttaaaaatctggatcaagctgaaaattgaaacgacacacagttaatgtgtgttcgagtctctcaaattttcgcaatcagaagtgaaacatcttcgggttgtgaggttaagcgactaagcgtacacggtggatgccctggcagtcagaggcgatgaaggacgtgctaatctgcgaaaagcgtcggtaaggtgatatgaaccgttacagccggcgatgtccgaatggggaaacccagtgtgattcgtcacactatcgttaactgaatacataggttaacgaggcgaaccgggggaactgaaacatctaagtaccccgaggaaaagaaatcaaccgagattcccccagtagcggcgagcgaacggggagcagcccagagtctgaatcagcttgtgtgttagtggaacggtctggaaagtccgacggtacagggtgatagtcccgtacaccaaaatgcacaggctgtgaactcgaagagtagggcgggacacgtggtatcctgtctgaatatggggggaccatcctccaaggctaaatactcctgactgaccgatagtgaaccagtaccgtgagggaaaggcgaaaagaaccccggcgaggggagtgaaaaagaacctgaaaccgtgtacgtacaagcagtgggagcacctttatggtgtgactgcgtaccttttgtataatgggtcagcgacttatattctgtagcaaggttaaccgtataggggagccgcagggaaaccgagtcttaactgggcgttaagttgcagggtatagacccgaaacccggtgatctagccatgggcaggttgaaggttgggtaacactaactggaggaccgaaccgactaatgttgaaaaattagcggatgacttgtggctgggggtgaaaggccaatcaaaccgggagatagctggttctccccgaaagctatttaggtagcgcctcgtgaattcatcttcgggggtagagcactgtttcggctagggggtcatcccgacttaccaacccgatgcaaactacgaataccgaagaatgttatcacgggagacacacggcgggtgctaacgtccgtcgtgaagagggaaacaacccagaccgccagctaaggtcccaaagtcacagttaagtgggaaacgatgtgggaaggcacagacagccaggatgttggcttagaagcagccatcatttaaagaaagcgtaatagctcactggtcgagtcggcctgcgcggaagatgtaacggggctaaactgtgcaccgaagctgcggcagcgacactatgtgttgttgggtaggggagcgttctgtaagcctgcgaaggtggcctgtgagggttgctggaggtatcagaagtgcgaatgctgacataagtaacgataatgcgggtgaaaagcccgcacgccggaagaccaagggttcctgtccaacgttaatcggggcagggtgagtcgacccctaaggcgaggccgaaaggcgtagtcgatgggaaacaggttaatattcctgtacttggtgttactgcgaaggggggacggagaaggctatgttagccgggcgacggttgtcccggtttaagcatgtaggcggaggttccaggtaaatccggtaccttttaacgctgaggtgtgatgacgaggcactacggtgctgaagtaacaaatgccctgcttccaggaaaagcctctaagcatcaggtaacattgaatcgtaccccaaaccgacacaggtggtcaggtagagaataccaaggcgcttgagagaactcgggtgaaggaactaggcaaaatggtgccgtaacttcgggagaaggcacgctgatatgtaggtgaagtccctgcggatggagctgaaatcagtcgaagataccagctggctgcaactgtttattaaaaacacagcactgtgcaaacacgaaagtggacgtatacggtgtgacgcctgcccggtgccggaaggttaattgatggggttatccgtaaggagaagctcttgatcgaagccccggtaaacggcggccgtaactataacggtcctaaggtagcgaaattccttgtcgggtaagttccgacctgcacgaatggcgtaatgatggccaggctgtctccacccgagactcagtgaaattgaactcgctgtgaagatgcagtgtacccgcggcaagacggaaagaccccgtgaacctttactatagcttgacactgaacattgagccttgatgtgtaggataggtgggaggctttgaagcgtggacgccagtctgcgtggagccaaccttgaaataccaccctttaatgtttgatgttctaacgttggcccctaatcggggttgcggacagtgtctggtgggtagtttgactggggcggtctcctcccaaagagtaacggaggagcacgaaggttagctaatcctggtcggacatcaggaggttagtgcaatggcataagctagcttgactgcgagcgtgacggcgcgagcaggtgcgaaagcaggtcatagtgatccggtggttctgaatggaagggccatcgctcaacggataaaaggtactccggggataacaggctgataccgcccaagagttcatatcgacggcggtgtttggcacctcgatgtcggctcatcacatcctggggctgaagtaggtcccaagggtatggctgttcgccatttaaagtggtacgcgagctgggtttagaacgtcgtgagacagttcggtccctatctgccgtgggcgctggagaattgaggggggctgctcctagtacgagaggaccggagtggacgcatcactggtgttcgggttgtcatgccaatggcattgcccggtagctaaatgcggaagagataagtgctgaaagcatctaagcacgaaacttgccccgagatgagttctccctgagactttaagtctcctgaaggaacgttaaagacgatgacgttgataggtcgggtgtgtaagcgtagcgatacgttgagctaaccgatactaatgaaccgtgaggcttaaccttacaacgccgaaggtgttttggcgatttgagatgattttcagcctgatacagattactcgatgcgtcctgaggacgtgttgaaaacagaatttgcctggcggcgatagcgcggtggtcccacctgaccccatgccgaactcagaagtgaaacgccgtagcgccgatggtagtgtggggtctccccatgtgagagtagggaactgccaggcatcaaataaaacgaaaggctcagtcgaaagactgggccttttgtttttgtgttttgcggtcagacgcgccgccatctcccccgcgcgccgggaaatgtgcgcggaacccctatttgtttatttttctaaatacattcaaatatgtatccgctcatgagacaataaccctgataaatgcttcaataatattgaaaaaggaagagtatgagtattcaacatttccgtgtcgcccttatccacgcgccgccatctcccccgcgcgccgggaaatgtgcgcggaacccctatttgtttatttttctaaatacattcaaatatgtatccgctcatgagacaataaccctgataaatgcttcaataatattgaaaaaggaagagtatgagtattcaacatttccgtgtcgcccttattcccttttttgcggcattttgccttcctgtttttgctcacccagaaacgctggtgaaagtaaaagatgctgaagatcagttgggtgcacgagtgggttacatcgaactggatctcaacagcggtaagatccttgagagttttcgccccgaagaacgttttccaatgatgagcacttttaaagttctgctatgtggcgcggtattatcccgtgttgacgccgggcaagagcaactcggtcgccgcatacactattctcagaatgacttggttgagtactcaccagtcacagaaaagcatcttacggatggcatgacagtaagagaattatgcagtgctgcaataaccatgagtgataacactgcggccaacttacttctgacaacgatcggaggaccgaaggagctaaccgcttttttgcacaacatgggggatcatgtaactcgccttgatcgttgggaaccggagctgaatgaagccataccaaacgacgagcgtgacaccacgatgcctgcagcaatggcaacaacgttgcgcaaactattaactggcgaactacttactctagcttcccggcaacaattaatagactggatggaggcggataaagttgcaggaccacttctgcgctcggcccttccggctagctggtttattgctgataaatctggagccggtgagcgtgggtctcgcggtatcattgcagcactggggccagatggtaagccctcccgtatcgtagttatctacacgacggggagtcaggcaactatggatgaacgaaatagacagatcgctgagataggtgcctcactgattaagcattggtaactgcagaccaagtttactcatatatactttagattgatttaaaacttcatttttaatttaaaaggatctaggtgaagatcctttttgataatctcatgaccaaaatcccttaacgtgagttttcgttccactgagcgtcagaccccgtagaaaagatcaaaggatcttcttgagatcctttttttctgcgcgtaatctgctgcttgcaaacaaaaaaaccaccgctaccagcggtggtttgtttgccggatcaagagctaccaactctttttccgaaggtaactggcttcagcagagcgcagataccaaatactgtccttctagtgtagccgtagttaggccaccacttcaagaactctgtagcaccgcctacatacctcgctctgctaatcctgttaccagtggctgctgccagtggcgataagtcgtgtcttaccgggttggactcaagacgatagttaccggataaggcgcagcggtcgggctgaacggggggttcgtgcacacagcccagcttggagcgaacgacctacaccgaactgagatacctacagcgtgagctatgagaaagcgccacgcttcccgaagggagaaaggcggacaggtatccggtaagcggcagggtcggaacaggagagcgcacgagggagcttccagggggaaacgcctggtatctttatagtcctgtcgggtttcgccacctctgacttgagcgtcgatttttgtgatgctcgtcaggggggcggagcctatggaaaaacgccagcaacgcggcctttttacggttcctggccttttgctgg

SEQ ID NO: 42 - DNA, 7416 bp, Artificial
  Synthetic
agacttagggaccctgcggccgccattaattcctaatttttgttgacactctatcattgatagagttattttaccactccctatcagtgatagagaaaagtgaaatgaatagaccggccgctgagaaaaagcgaagcggcactgctctttaacaatttatcagacaatctgtgtgggcactcgaagatacggattcttaacgtcgcaagacgaaaaatgaataccaagtctcaagagtgaacacgtaattcattacgaagtttaattctttgagcgtcaaacttttaaattgaagagtttgatcatggctcagattgaacgctggcggcaggcctaacacatgcaagtcgagcggtagcacagagagcttgctctcgggtgacgagcggcggacgggtgagtaatgtctgggaaactgcctgatggagggggataactactggaaacggtagctaataccgcataacgtcgcaagaccaaagtgggggaccttcgggcctcatgccatcagatgtgcccagatgggattagctagtaggtggggtaatggctcacctaggcgacgatccctagctggtctgagaggatgaccagccacactggaactgagacacggtccagactcctacgggaggcagcagtggggaatattgcacaatgggcgcaagcctgatgcagccatgccgcgtgtatgaagaaggccttcgggttgtaaagtactttcagcgaggaggaaggcgttaaggttaataaccttggcgattgacgttactcgcagaagaagcaccggctaactccgtgccagcagccgcggtaatacggagggtgcaagcgttaatcggaattactgggcgtaaagcgcacgcaggcggtctgtcaagtcggatgtgaaatccccgggctcaacctgggaactgcattcgaaactggcaggctagagtcttgtagaggggggtagaattccaggtgtagcggtgaaatgcgtagagatctggaggaataccggtggcgaaggcggccccctggacaaagactgacgctcaggtgcgaaagcgtggggagcaaacaggattagataccctggtagtccacgccgtaaacgatgtcgacttggaggttgtgcccttgaggcgtggcttccggagctaacgcgttaagtcgaccgcctggggagtacggccgcaaggttaaaactcaaatgaattgacgggggcccgcacaagcggtggagcatgtggtttaattcgatgcaacgcgaagaaccttacctactcttgacatccagagaacttagcagagatgctttggtgccttcgggaactctgagacaggtgctgcatggctgtcgtcagctcgtgttgtgaaatgttgggttaagtcccgcaacgagcgcaacccttatcctttgttgccagcgattcggtcgggaactcaaaggagactgccagtgataaactggaggaaggtggggatgacgtcaagtcatcatggcccttacgagtagggctacacacgtgctacaatggcatatacaaagagaagcgacctcgcgagagcaagcggacctcataaagtatgtcgtagtccggattggagtctgcaactcgactccatgaagtcggaatcgctagtaatcgtagatcagaatgctacggtgaatacgttcccgggccttgtacacaccgcccgtcacaccatgggagtgggttgcaaaagaagtaggtagcttaaccttcgggagggcgcttaccactttgtgattcatgactggggtgaagtcgtaacaaggtaaccgtaggggaacctgcggttggatcacctccttaccttaaagaagcgtactttgtagtgctcacacagattgtctgatagaaagtgaaaagcaaggcgtttacgcgttgggagtgaggctgaagagaataaggccgttcgctttctattaatgaaagctcaccctacacgaaaatatcacgcaacgcgtgataagcaattttcgtgtccccttcgtctagaggcccaggacaccgccctttcacggcggtaacaggggttcgaatcccctaggggacgccacttgctggtttgtgagtgaaagtcgccgaccttaatatctcaaaactcatcttcgggtgatgtttgagatatttgctctttaaaaatctggatcaagctgaaaattgaaacactgaacaacgagagttgttcgtgagtctctcaaattttcgcaacacgatgatgaatcgaaagaaacatcttcgggttgtgaggttaagcgactaagcgtacacggtggatgccctggcagtcagaggcgatgaaggacgtgctaatctgcgaaaagcgtcggtaaggtgatatgaaccgttacagccggcgatgtccgaatggggaaacccagtgtgattcgtcacactatcgttaactgaatacataggttaacgaggcgaaccgggggaactgaaacatctaagtaccccgaggaaaagaaatcaaccgagattcccccagtagcggcgagcgaacggggagcagcccagagtctgaatcagcttgtgtgttagtggaacggtctggaaagtccgacggtacagggtgatagtcccgtacaccaaaatgcacaggctgtgaactcgaagagtagggcgggacacgtggtatcctgtctgaatatggggggaccatcctccaaggctaaatactcctgactgaccgatagtgaaccagtaccgtgagggaaaggcgaaaagaaccccggcgaggggagtgaaaaagaacctgaaaccgtgtacgtacaagcagtgggagcacctttatggtgtgactgcgtaccttttgtataatgggtcagcgacttatattctgtagcaaggttaaccgtataggggagccgcagggaaaccgagtcttaactgggcgttaagttgcagggtatagacccgaaacccggtgatctagccatgggcaggttgaaggttgggtaacactaactggaggaccgaaccgactaatgttgaaaaattagcggatgacttgtggctgggggtgaaaggccaatcaaaccgggagatagctggttctccccgaaagctatttaggtagcgcctcgtgaattcatcttcgggggtagagcactgtttcggctagggggtcatcccgacttaccaacccgatgcaaactacgaataccgaagaatgttatcacgggagacacacggcgggtgctaacgtccgtcgtgaagagggaaacaacccagaccgccagctaaggtcccaaagtcacagttaagtgggaaacgatgtgggaaggcacagacagccaggatgttggcttagaagcagccatcatttaaagaaagcgtaatagctcactggtcgagtcggcctgcgcggaagatgtaacggggctaaactgtgcaccgaagctgcggcagcgacactatgtgttgttgggtaggggagcgttctgtaagcctgcgaaggtggcctgtgagggttgctggaggtatcagaagtgcgaatgctgacataagtaacgataatgcgggtgaaaagcccgcacgccggaagaccaagggttcctgtccaacgttaatcggggcagggtgagtcgacccctaaggcgaggccgaaaggcgtagtcgatgggaaacaggttaatattcctgtacttggtgttactgcgaaggggggacggagaaggctatgttagccgggcgacggttgtcccggtttaagcatgtaggcggaggttccaggtaaatccggtaccttttaacgctgaggtgtgatgacgaggcactacggtgctgaagtaacaaatgccctgcttccaggaaaagcctctaagcatcaggtaacattgaatcgtaccccaaaccgacacaggtggtcaggtagagaataccaaggcgcttgagagaactcgggtgaaggaactaggcaaaatggtgccgtaacttcgggagaaggcacgctgatatgtaggtgaagtccctgcggatggagctgaaatcagtcgaagataccagctggctgcaactgtttattaaaaacacagcactgtgcaaacacgaaagtggacgtatacggtgtgacgcctgcccggtgccggaaggttaattgatggggttatccgtaaggagaagctcttgatcgaagccccggtaaacggcggccgtaactataacggtcctaaggtagcgaaattccttgtcgggtaagttccgacctgcacgaatggcgtaatgatggccaggctgtctccacccgagactcagtgaaattgaactcgctgtgaagatgcagtgtacccgcggcaagacggaaagaccccgtgaacctttactatagcttgacactgaacattgagccttgatgtgtaggataggtgggaggctttgaagcgtggacgccagtctgcgtggagccaaccttgaaataccaccctttaatgtttgatgttctaacgttggcccctaatcggggttgcggacagtgtctggtgggtagtttgactggggcggtctcctcccaaagagtaacggaggagcacgaaggttagctaatcctggtcggacatcaggaggttagtgcaatggcataagctagcttgactgcgagcgtgacggcgcgagcaggtgcgaaagcaggtcatagtgatccggtggttctgaatggaagggccatcgctcaacggataaaaggtactccggggataacaggctgataccgcccaagagttcatatcgacggcggtgtttggcacctcgatgtcggctcatcacatcctggggctgaagtaggtcccaagggtatggctgttcgccatttaaagtggtacgcgagctgggtttagaacgtcgtgagacagttcggtccctatctgccgtgggcgctggagaattgaggggggctgctcctagtacgagaggaccggagtggacgcatcactggtgttcgggttgtcatgccaatggcattgcccggtagctaaatgcggaagagataagtgctgaaagcatctaagcacgaaacttgccccgagatgagttctccctgagactttaagtctcctgaaggaacgttaaagacgatgacgttgataggtcgggtgtgtaagcgtagcgatacgttgagctaaccgatactaatgaaccgtgaggcttaaccttacaacgccgaagctgttttggcggatgagagaagattttcagcctgatacagattaaatcagaacgcagaagcggtctgataaaacagaattgcctggcggcgatagcgcggtggtcccacctgaccccatgccgaactcagaagtgaaacgccgtagcgccgatggtagtgtggggtctccccatgtgagagtagggaactgccaggcatcaaataaaacgaaaggctcagtcgaaagactgggcctttcgttttatctgttgtttgtcggtgaacgctctcctgagtaggacaaatccgccgggagcggatttgaacgttgcgaagcaacggcccggagggtggcgggcaggacgcccgccataaactgccaggcatcaaattaagcagaaggccatcctgacggatggcctttttgcgtttctacaaactcttcctgtcgtcatatctacaagccggcgcgccgggaaatgtgcgcggaacccctatttgtttatttttctaaatacattcaaatatgtatccgctcatgagacaataaccctgataaatgcttcaataatattgaaaaaggaagagtatgagtattcaacatttccgtgtcgcccttattcccttttttgcggcattttgccttcctgtttttgctcacccagaaacgctggtgaaagtaaaagatgctgaagatcagttgggtgcacgagtgggttacatcgaactggatctcaacagcggtaagatccttgagagttttcgccccgaagaacgttttccaatgatgagcacttttaaagttctgctatgtggcgcggtattatcccgtgttgacgccgggcaagagcaactcggtcgccgcatacactattctcagaatgacttggttgagtactcaccagtcacagaaaagcatcttacggatggcatgacagtaagagaattatgcagtgctgcaataaccatgagtgataacactgcggccaacttacttctgacaacgatcggaggaccgaaggagctaaccgcttttttgcacaacatgggggatcatgtaactcgccttgatcgttgggaaccggagctgaatgaagccataccaaacgacgagcgtgacaccacgatgcctgcagcaatggcaacaacgttgcgcaaactattaactggcgaactacttactctagcttcccggcaacaattaatagactggatggaggcggataaagttgcaggaccacttctgcgctcggcccttccggctagctggtttattgctgataaatctggagccggtgagcgtgggtctcgcggtatcattgcagcactggggccagatggtaagccctcccgtatcgtagttatctacacgacggggagtcaggcaactatggatgaacgaaatagacagatcgctgagataggtgcctcactgattaagcattggtaactgcagaccaagtttactcatatatactttagattgatttaaaacttcatttttaatttaaaaggatctaggtgaagatcctttttgataatctcatgaccaaaatcccttaacgtgagttttcgttccactgagcgtcagaccccgtagaaaagatcaaaggatcttcttgagatcctttttttctgcgcgtaatctgctgcttgcaaacaaaaaaaccaccgctaccagcggtggtttgtttgccggatcaagagctaccaactctttttccgaaggtaactggcttcagcagagcgcagataccaaatactgtccttctagtgtagccgtagttaggccaccacttcaagaactctgtagcaccgcctacatacctcgctctgctaatcctgttaccagtggctgctgccagtggcgataagtcgtgtcttaccgggttggactcaagacgatagttaccggataaggcgcagcggtcgggctgaacggggggttcgtgcacacagcccagcttggagcgaacgacctacaccgaactgagatacctacagcgtgagctatgagaaagcgccacgcttcccgaagggagaaaggcggacaggtatccggtaagcggcagggtcggaacaggagagcgcacgagggagcttccagggggaaacgcctggtatctttatagtcctgtcgggtttcgccacctctgacttgagcgtcgatttttgtgatgctcgtcaggggggcggagcctatggaaaaacgccagcaacgcggcctttttacggttcctggccttttgctgg

SEQ ID NO: 43 - DNA, 7320 bp, Artificial
  Synthetic
agacttagggaccctgcggccgccattaattcctaatttttgttgacactctatcattgatagagttattttaccactccctatcagtgatagagaaaagtgaaatgaatagaccggccgctgagaaaaagcgaagcggccgcaactgctctttaacaatttatcagacaatctgtgtgggcactcaaagtgacatggattcttaatgtcttcggacaataaatgaataccaagtctctgagtgaacatacgtaattcattacgaagtttaattcacgagcatcaaacttaaattgaagagtttgatcatggctcagattgaacgctggcggcaggcctaacacatgcaagtcgagcggtagcacagagagcttgctctcgggtgacgagcggcggacgggtgagtaatgtctgggaaactgcctgatggagggggataactactggaaacggtagctaataccgcataacgtcgcaagaccaaagtgggggaccttcgggcctcatgccatcagatgtgcccagatgggattagctagtaggtggggtaatggctcacctaggcgacgatccctagctggtctgagaggatgaccagccacactggaactgagacacggtccagactcctacgggaggcagcagtggggaatattgcacaatgggcgcaagcctgatgcagccatgccgcgtgtatgaagaaggccttcgggttgtaaagtactttcagcgaggaggaaggcgttaaggttaataaccttggcgattgacgttactcgcagaagaagcaccggctaactccgtgccagcagccgcggtaatacggagggtgcaagcgttaatcggaattactgggcgtaaagcgcacgcaggcggtctgtcaagtcggatgtgaaatccccgggctcaacctgggaactgcattcgaaactggcaggctagagtcttgtagaggggggtagaattccaggtgtagcggtgaaatgcgtagagatctggaggaataccggtggcgaaggcggccccctggacaaagactgacgctcaggtgcgaaagcgtggggagcaaacaggattagataccctggtagtccacgccgtaaacgatgtcgacttggaggttgtgcccttgaggcgtggcttccggagctaacgcgttaagtcgaccgcctggggagtacggccgcaaggttaaaactcaaatgaattgacgggggcccgcacaagcggtggagcatgtggtttaattcgatgcaacgcgaagaaccttacctactcttgacatccagagaacttagcagagatgctttggtgccttcgggaactctgagacaggtgctgcatggctgtcgtcagctcgtgttgtgaaatgttgggttaagtcccgcaacgagcgcaacccttatcctttgttgccagcgattcggtcgggaactcaaaggagactgccagtgataaactggaggaaggtggggatgacgtcaagtcatcatggcccttacgagtagggctacacacgtgctacaatggcatatacaaagagaagcgacctcgcgagagcaagcggacctcataaagtatgtcgtagtccggattggagtctgcaactcgactccatgaagtcggaatcgctagtaatcgtagatcagaatgctacggtgaatacgttcccgggccttgtacacaccgcccgtcacaccatgggagtgggttgcaaaagaagtaggtagcttaaccttcgggagggcgcttaccactttgtgattcatgactggggtgaagtcgtaacaaggtaaccgtaggggaacctgcggttggatcatgtggttaccttaaagaacctgcctttgtagtgctcacacagattgtctgatgaaagtagagaagcaaggcgtcttgcgattgagacttcagtgtccccttcgtctagaggcccaggacaccgccctttcacggcggtaacaggggttcgaatcccctaggggacgccacttgctggttcgtgagtgaaagacgcgtgccgatatatctcaaaactcatcttcgggtgacgtttgagatatttgctctttaaaaatctggatcaagctgaaaattgaaacgacacacagttaatgtgtgttcgagtctctcaaattttcgcaatcagaagtgaaacatcttcgggttgtgaggttaagcgactaagcgtacacggtggatgccctggcagtcagaggcgatgaaggacgtgctaatctgcgaaaagcgtcggtaaggtgatatgaaccgttacagccggcgatgtccgaatggggaaacccagtgtgattcgtcacactatcgttaactgaatacataggttaacgaggcgaaccgggggaactgaaacatctaagtaccccgaggaaaagaaatcaaccgagattcccccagtagcggcgagcgaacggggagcagcccagagtctgaatcagcttgtgtgttagtggaacggtctggaaagtccgacggtacagggtgatagtcccgtacaccaaaatgcacaggctgtgaactcgaagagtagggcgggacacgtggtatcctgtctgaatatggggggaccatcctccaaggctaaatactcctgactgaccgatagtgaaccagtaccgtgagggaaaggcgaaaagaaccccggcgaggggagtgaaaaagaacctgaaaccgtgtacgtacaagcagtgggagcacctttatggtgtgactgcgtaccttttgtataatgggtcagcgacttatattctgtagcaaggttaaccgtataggggagccgcagggaaaccgagtcttaactgggcgttaagttgcagggtatagacccgaaacccggtgatctagccatgggcaggttgaaggttgggtaacactaactggaggaccgaaccgactaatgttgaaaaattagcggatgacttgtggctgggggtgaaaggccaatcaaaccgggagatagctggttctccccgaaagctatttaggtagcgcctcgtgaattcatcttcgggggtagagcactgtttcggctagggggtcatcccgacttaccaacccgatgcaaactacgaataccgaagaatgttatcacgggagacacacggcgggtgctaacgtccgtcgtgaagagggaaacaacccagaccgccagctaaggtcccaaagtcacagttaagtgggaaacgatgtgggaaggcacagacagccaggatgttggcttagaagcagccatcatttaaagaaagcgtaatagctcactggtcgagtcggcctgcgcggaagatgtaacggggctaaactgtgcaccgaagctgcggcagcgacactatgtgttgttgggtaggggagcgttctgtaagcctgcgaaggtggcctgtgagggttgctggaggtatcagaagtgcgaatgctgacataagtaacgataatgcgggtgaaaagcccgcacgccggaagaccaagggttcctgtccaacgttaatcggggcagggtgagtcgacccctaaggcgaggccgaaaggcgtagtcgatgggaaacaggttaatattcctgtacttggtgttactgcgaaggggggacggagaaggctatgttagccgggcgacggttgtcccggtttaagcatgtaggcggaggttccaggtaaatccggtaccttttaacgctgaggtgtgatgacgaggcactacggtgctgaagtaacaaatgccctgcttccaggaaaagcctctaagcatcaggtaacattgaatcgtaccccaaaccgacacaggtggtcaggtagagaataccaaggcgcttgagagaactcgggtgaaggaactaggcaaaatggtgccgtaacttcgggagaaggcacgctgatatgtaggtgaagtccctgcggatggagctgaaatcagtcgaagataccagctggctgcaactgtttattaaaaacacagcactgtgcaaacacgaaagtggacgtatacggtgtgacgcctgcccggtgccggaaggttaattgatggggttatccgtaaggagaagctcttgatcgaagccccggtaaacggcggccgtaactataacggtcctaaggtagcgaaattccttgtcgggtaagttccgacctgcacgaatggcgtaatgatggccaggctgtctccacccgagactcagtgaaattgaactcgctgtgaagatgcagtgtacccgcggcaagacggaaagaccccgtgaacctttactatagcttgacactgaacattgagccttgatgtgtaggataggtgggaggctttgaagcgtggacgccagtctgcgtggagccaaccttgaaataccaccctttaatgtttgatgttctaacgttggcccctaatcggggttgcggacagtgtctggtgggtagtttgactggggcggtctcctcccaaagagtaacggaggagcacgaaggttagctaatcctggtcggacatcaggaggttagtgcaatggcataagctagcttgactgcgagcgtgacggcgcgagcaggtgcgaaagcaggtcatagtgatccggtggttctgaatggaagggccatcgctcaacggataaaaggtactccggggataacaggctgataccgcccaagagttcatatcgacggcggtgtttggcacctcgatgtcggctcatcacatcctggggctgaagtaggtcccaagggtatggctgttcgccatttaaagtggtacgcgagctgggtttagaacgtcgtgagacagttcggtccctatctgccgtgggcgctggagaattgaggggggctgctcctagtacgagaggaccggagtggacgcatcactggtgttcgggttgtcatgccaatggcattgcccggtagctaaatgcggaagagataagtgctgaaagcatctaagcacgaaacttgccccgagatgagttctccctgagactttaagtctcctgaaggaacgttaaagacgatgacgttgataggtcgggtgtgtaagcgtagcgatacgttgagctaaccgatactaatgaaccgtgaggcttaaccttacaacgccgaaggtgttttggcgatttgagatgattttcagcctgatacagattactcgatgcgtcctgaggacgtgttgaaaacagaatttgcctggcggcgatagcgcggtggtcccacctgaccccatgccgaactcagaagtgaaacgccgtagcgccgatggtagtgtggggtctccccatgtgagagtagggaactgccaggcatcaaataaaacgaaaggctcagtcgaaagactgggccttttgtttttgtgttttgcggtcagacgcaccgccatctcccccggtggcgctgcgcttaccggggctacaaaaaccgtagcccggaaaaggtgcgcagcaccgcctccggggaaagccgctgtcatagcaacgtaaacgaaaggctcagtcggaagaccgggccttttgttttggtgttttgcggccagacgcgccgccatctcccccgcgcgccgggaaatgtgcgcggaacccctatttgtttatttttctaaatacattcaaatatgtatccgctcatgagacaataaccctgataaatgcttcaataatattgaaaaaggaagagtatgagtattcaacatttccgtgtcgcccttattcccttttttgcggcattttgccttcctgtttttgctcacccagaaacgctggtgaaagtaaaagatgctgaagatcagttgggtgcacgagtgggttacatcgaactggatctcaacagcggtaagatccttgagagttttcgccccgaagaacgttttccaatgatgagcacttttaaagttctgctatgtggcgcggtattatcccgtgttgacgccgggcaagagcaactcggtcgccgcatacactattctcagaatgacttggttgagtactcaccagtcacagaaaagcatcttacggatggcatgacagtaagagaattatgcagtgctgcaataaccatgagtgataacactgcggccaacttacttctgacaacgatcggaggaccgaaggagctaaccgcttttttgcacaacatgggggatcatgtaactcgccttgatcgttgggaaccggagctgaatgaagccataccaaacgacgagcgtgacaccacgatgcctgcagcaatggcaacaacgttgcgcaaactattaactggcgaactacttactctagcttcccggcaacaattaatagactggatggaggcggataaagttgcaggaccacttctgcgctcggcccttccggctagctggtttattgctgataaatctggagccggtgagcgtgggtctcgcggtatcattgcagcactggggccagatggtaagccctcccgtatcgtagttatctacacgacggggagtcaggcaactatggatgaacgaaatagacagatcgctgagataggtgcctcactgattaagcattggtaactgcagaccaagtttactcatatatactttagattgatttaaaacttcatttttaatttaaaaggatctaggtgaagatcctttttgataatctcatgaccaaaatcccttaacgtgagttttcgttccactgagcgtcagaccccgtagaaaagatcaaaggatcttcttgagatcctttttttctgcgcgtaatctgctgcttgcaaacaaaaaaaccaccgctaccagcggtggtttgtttgccggatcaagagctaccaactctttttccgaaggtaactggcttcagcagagcgcagataccaaatactgtccttctagtgtagccgtagttaggccaccacttcaagaactctgtagcaccgcctacatacctcgctctgctaatcctgttaccagtggctgctgccagtggcgataagtcgtgtcttaccgggttggactcaagacgatagttaccggataaggcgcagcggtcgggctgaacggggggttcgtgcacacagcccagcttggagcgaacgacctacaccgaactgagatacctacagcgtgagctatgagaaagcgccacgcttcccgaagggagaaaggcggacaggtatccggtaagcggcagggtcggaacaggagagcgcacgagggagcttccagggggaaacgcctggtatctttatagtcctgtcgggtttcgccacctctgacttgagcgtcgatttttgtgatgctcgtcaggggggcggagcctatggaaaaacgccagcaacgcggcctttttacggttcctggccttttgctgg

SEQ ID NO: 44 - DNA, 7416 bp, Artificial
  Synthetic
agacttagggaccctgcggccgccattaattcctaatttttgttgacactctatcattgatagagttattttaccactccctatcagtgatagagaaaagtgaaatgaatagaccggccgctgagaaaaagcgaagcggcactgctctttaacaatttatcagacaatctgtgtgggcactcgaagatacggattcttaacgtcgcaagacgaaaaatgaataccaagtctcaagagtgaacacgtaattcattacgaagtttaattctttgagcgtcaaacttttaaattgaagagtttgatcatggctcagattgaacgctggcggcaggcctaacacatgcaagtcgagcggtagcacagagagcttgctctcgggtgacgagcggcggacgggtgagtaatgtctgggaaactgcctgatggagggggataactactggaaacggtagctaataccgcataacgtcgcaagaccaaagtgggggaccttcgggcctcatgccatcagatgtgcccagatgggattagctagtaggtggggtaatggctcacctaggcgacgatccctagctggtctgagaggatgaccagccacactggaactgagacacggtccagactcctacgggaggcagcagtggggaatattgcacaatgggcgcaagcctgatgcagccatgccgcgtgtatgaagaaggccttcgggttgtaaagtactttcagcgaggaggaaggcgttaaggttaataaccttggcgattgacgttactcgcagaagaagcaccggctaactccgtgccagcagccgcggtaatacggagggtgcaagcgttaatcggaattactgggcgtaaagcgcacgcaggcggtctgtcaagtcggatgtgaaatccccgggctcaacctgggaactgcattcgaaactggcaggctagagtcttgtagaggggggtagaattccaggtgtagcggtgaaatgcgtagagatctggaggaataccggtggcgaaggcggccccctggacaaagactgacgctcaggtgcgaaagcgtggggagcaaacaggattagataccctggtagtccacgccgtaaacgatgtcgacttggaggttgtgcccttgaggcgtggcttccggagctaacgcgttaagtcgaccgcctggggagtacggccgcaaggttaaaactcaaatgaattgacgggggcccgcacaagcggtggagcatgtggtttaattcgatgcaacgcgaagaaccttacctactcttgacatccagagaacttagcagagatgctttggtgccttcgggaactctgagacaggtgctgcatggctgtcgtcagctcgtgttgtgaaatgttgggttaagtcccgcaacgagcgcaacccttatcctttgttgccagcgattcggtcgggaactcaaaggagactgccagtgataaactggaggaaggtggggatgacgtcaagtcatcatggcccttacgagtagggctacacacgtgctacaatggcatatacaaagagaagcgacctcgcgagagcaagcggacctcataaagtatgtcgtagtccggattggagtctgcaactcgactccatgaagtcggaatcgctagtaatcgtagatcagaatgctacggtgaatacgttcccgggccttgtacacaccgcccgtcacaccatgggagtgggttgcaaaagaagtaggtagcttaaccttcgggagggcgcttaccactttgtgattcatgactggggtgaagtcgtaacaaggtaaccgtaggggaacctgcggttggatcatgtggttaccttaaagaagcgtactttgtagtgctcacacagattgtctgatagaaagtgaaaagcaaggcgtttacgcgttgggagtgaggctgaagagaataaggccgttcgctttctattaatgaaagctcaccctacacgaaaatatcacgcaacgcgtgataagcaattttcgtgtccccttcgtctagaggcccaggacaccgccctttcacggcggtaacaggggttcgaatcccctaggggacgccacttgctggtttgtgagtgaaagtcgccgaccttaatatctcaaaactcatcttcgggtgatgtttgagatatttgctctttaaaaatctggatcaagctgaaaattgaaacactgaacaacgagagttgttcgtgagtctctcaaattttcgcaacacgatgatgaatcgaaagaaacatcttcgggttgtgaggttaagcgactaagcgtacacggtggatgccctggcagtcagaggcgatgaaggacgtgctaatctgcgaaaagcgtcggtaaggtgatatgaaccgttacagccggcgatgtccgaatggggaaacccagtgtgattcgtcacactatcgttaactgaatacataggttaacgaggcgaaccgggggaactgaaacatctaagtaccccgaggaaaagaaatcaaccgagattcccccagtagcggcgagcgaacggggagcagcccagagtctgaatcagcttgtgtgttagtggaacggtctggaaagtccgacggtacagggtgatagtcccgtacaccaaaatgcacaggctgtgaactcgaagagtagggcgggacacgtggtatcctgtctgaatatggggggaccatcctccaaggctaaatactcctgactgaccgatagtgaaccagtaccgtgagggaaaggcgaaaagaaccccggcgaggggagtgaaaaagaacctgaaaccgtgtacgtacaagcagtgggagcacctttatggtgtgactgcgtaccttttgtataatgggtcagcgacttatattctgtagcaaggttaaccgtataggggagccgcagggaaaccgagtcttaactgggcgttaagttgcagggtatagacccgaaacccggtgatctagccatgggcaggttgaaggttgggtaacactaactggaggaccgaaccgactaatgttgaaaaattagcggatgacttgtggctgggggtgaaaggccaatcaaaccgggagatagctggttctccccgaaagctatttaggtagcgcctcgtgaattcatcttcgggggtagagcactgtttcggctagggggtcatcccgacttaccaacccgatgcaaactacgaataccgaagaatgttatcacgggagacacacggcgggtgctaacgtccgtcgtgaagagggaaacaacccagaccgccagctaaggtcccaaagtcacagttaagtgggaaacgatgtgggaaggcacagacagccaggatgttggcttagaagcagccatcatttaaagaaagcgtaatagctcactggtcgagtcggcctgcgcggaagatgtaacggggctaaactgtgcaccgaagctgcggcagcgacactatgtgttgttgggtaggggagcgttctgtaagcctgcgaaggtggcctgtgagggttgctggaggtatcagaagtgcgaatgctgacataagtaacgataatgcgggtgaaaagcccgcacgccggaagaccaagggttcctgtccaacgttaatcggggcagggtgagtcgacccctaaggcgaggccgaaaggcgtagtcgatgggaaacaggttaatattcctgtacttggtgttactgcgaaggggggacggagaaggctatgttagccgggcgacggttgtcccggtttaagcatgtaggcggaggttccaggtaaatccggtaccttttaacgctgaggtgtgatgacgaggcactacggtgctgaagtaacaaatgccctgcttccaggaaaagcctctaagcatcaggtaacattgaatcgtaccccaaaccgacacaggtggtcaggtagagaataccaaggcgcttgagagaactcgggtgaaggaactaggcaaaatggtgccgtaacttcgggagaaggcacgctgatatgtaggtgaagtccctgcggatggagctgaaatcagtcgaagataccagctggctgcaactgtttattaaaaacacagcactgtgcaaacacgaaagtggacgtatacggtgtgacgcctgcccggtgccggaaggttaattgatggggttatccgtaaggagaagctcttgatcgaagccccggtaaacggcggccgtaactataacggtcctaaggtagcgaaattccttgtcgggtaagttccgacctgcacgaatggcgtaatgatggccaggctgtctccacccgagactcagtgaaattgaactcgctgtgaagatgcagtgtacccgcggcaagacggaaagaccccgtgaacctttactatagcttgacactgaacattgagccttgatgtgtaggataggtgggaggctttgaagcgtggacgccagtctgcgtggagccaaccttgaaataccaccctttaatgtttgatgttctaacgttggcccctaatcggggttgcggacagtgtctggtgggtagtttgactggggcggtctcctcccaaagagtaacggaggagcacgaaggttagctaatcctggtcggacatcaggaggttagtgcaatggcataagctagcttgactgcgagcgtgacggcgcgagcaggtgcgaaagcaggtcatagtgatccggtggttctgaatggaagggccatcgctcaacggataaaaggtactccggggataacaggctgataccgcccaagagttcatatcgacggcggtgtttggcacctcgatgtcggctcatcacatcctggggctgaagtaggtcccaagggtatggctgttcgccatttaaagtggtacgcgagctgggtttagaacgtcgtgagacagttcggtccctatctgccgtgggcgctggagaattgaggggggctgctcctagtacgagaggaccggagtggacgcatcactggtgttcgggttgtcatgccaatggcattgcccggtagctaaatgcggaagagataagtgctgaaagcatctaagcacgaaacttgccccgagatgagttctccctgagactttaagtctcctgaaggaacgttaaagacgatgacgttgataggtcgggtgtgtaagcgtagcgatacgttgagctaaccgatactaatgaaccgtgaggcttaaccttacaacgccgaagctgttttggcggatgagagaagattttcagcctgatacagattaaatcagaacgcagaagcggtctgataaaacagaattgcctggcggcgatagcgcggtggtcccacctgaccccatgccgaactcagaagtgaaacgccgtagcgccgatggtagtgtggggtctccccatgtgagagtagggaactgccaggcatcaaataaaacgaaaggctcagtcgaaagactgggcctttcgttttatctgttgtttgtcggtgaacgctctcctgagtaggacaaatccgccgggagcggatttgaacgttgcgaagcaacggcccggagggtggcgggcaggacgcccgccataaactgccaggcatcaaattaagcagaaggccatcctgacggatggcctttttgcgtttctacaaactcttcctgtcgtcatatctacaagccggcgcgccgggaaatgtgcgcggaacccctatttgtttatttttctaaatacattcaaatatgtatccgctcatgagacaataaccctgataaatgcttcaataatattgaaaaaggaagagtatgagtattcaacatttccgtgtcgcccttattcccttttttgcggcattttgccttcctgtttttgctcacccagaaacgctggtgaaagtaaaagatgctgaagatcagttgggtgcacgagtgggttacatcgaactggatctcaacagcggtaagatccttgagagttttcgccccgaagaacgttttccaatgatgagcacttttaaagttctgctatgtggcgcggtattatcccgtgttgacgccgggcaagagcaactcggtcgccgcatacactattctcagaatgacttggttgagtactcaccagtcacagaaaagcatcttacggatggcatgacagtaagagaattatgcagtgctgcaataaccatgagtgataacactgcggccaacttacttctgacaacgatcggaggaccgaaggagctaaccgcttttttgcacaacatgggggatcatgtaactcgccttgatcgttgggaaccggagctgaatgaagccataccaaacgacgagcgtgacaccacgatgcctgcagcaatggcaacaacgttgcgcaaactattaactggcgaactacttactctagcttcccggcaacaattaatagactggatggaggcggataaagttgcaggaccacttctgcgctcggcccttccggctagctggtttattgctgataaatctggagccggtgagcgtgggtctcgcggtatcattgcagcactggggccagatggtaagccctcccgtatcgtagttatctacacgacggggagtcaggcaactatggatgaacgaaatagacagatcgctgagataggtgcctcactgattaagcattggtaactgcagaccaagtttactcatatatactttagattgatttaaaacttcatttttaatttaaaaggatctaggtgaagatcctttttgataatctcatgaccaaaatcccttaacgtgagttttcgttccactgagcgtcagaccccgtagaaaagatcaaaggatcttcttgagatcctttttttctgcgcgtaatctgctgcttgcaaacaaaaaaaccaccgctaccagcggtggtttgtttgccggatcaagagctaccaactctttttccgaaggtaactggcttcagcagagcgcagataccaaatactgtccttctagtgtagccgtagttaggccaccacttcaagaactctgtagcaccgcctacatacctcgctctgctaatcctgttaccagtggctgctgccagtggcgataagtcgtgtcttaccgggttggactcaagacgatagttaccggataaggcgcagcggtcgggctgaacggggggttcgtgcacacagcccagcttggagcgaacgacctacaccgaactgagatacctacagcgtgagctatgagaaagcgccacgcttcccgaagggagaaaggcggacaggtatccggtaagcggcagggtcggaacaggagagcgcacgagggagcttccagggggaaacgcctggtatctttatagtcctgtcgggtttcgccacctctgacttgagcgtcgatttttgtgatgctcgtcaggggggcggagcctatggaaaaacgccagcaacgcggcctttttacggttcctggccttttgctgg

SEQ ID NO: 45 - DNA, 7320 bp, Artificial
  Synthetic
agacttagggaccctgcggccgccattaattcctaatttttgttgacactctatcattgatagagttattttaccactccctatcagtgatagagaaaagtgaaatgaatagaccggccgctgagaaaaagcgaagcggccggcactgctctttaacaatttatcagacaatctgtgtgggcactcaaagtgacatggattcttaacgtcctcggacgaaaaatgaataccaagtctcaagagtgaacacgtaattcattacgaagtttaattctttgagcatcaaacttaaattgaagagtttgatcatggctcagattgaacgctggcggcaggcctaacacatgcaagtcgagcggtagcacagagagcttgctctcgggtgacgagcggcggacgggtgagtaatgtctgggaaactgcctgatggagggggataactactggaaacggtagctaataccgcataacgtcgcaagaccaaagtgggggaccttcgggcctcatgccatcagatgtgcccagatgggattagctagtaggtggggtaacggctcacctaggcgacgatccctagctggtctgagaggatgaccagccacactggaactgagacacggtccagactcctacgggaggcagcagtggggaatattgcacaatgggcgcaagcctgatgcagccatgccgcgtgtgtgaagaaggccttcgggttgtaaagcactttcagcggggaggaaggcggtgaggttaataacctcatcgattgacgttacccgcagaagaagcaccggctaactccgtgccagcagccgcggtaatacggagggtgcaagcgttaatcggaattactgggcgtaaagcgcacgcaggcggtctgtcaagtcggatgtgaaatccccgggctcaacctgggaactgcattcgaaactggcaggctagagtcttgtagaggggggtagaattccaggtgtagcggtgaaatgcgtagagatctggaggaataccggtggcgaaggcggccccctggacaaagactgacgctcaggtgcgaaagcgtggggagcaaacaggattagataccctggtagtccacgccgtaaacgatgtcgatttggaggttgtgcccttgaggcgtggcttccggagctaacgcgttaaatcgaccgcctggggagtacggccgcaaggttaaaactcaaatgaattgacgggggcccgcacaagcggtggagcatgtggtttaattcgatgcaacgcgaagaaccttacctggtcttgacatccacagaactttccagagatggattggtgccttcgggaactgtgagacaggtgctgcatggctgtcgtcagctcgtgttgtgaaatgttgggttaagtcccgcaacgagcgcaacccttatcctttgttgccagcggttaggccgggaactcaaaggagactgccagtgataaactggaggaaggtggggatgacgtcaagtcatcatggcccttacgaccagggctacacacgtgctacaatggcatatacaaagagaagcgacctcgcgagagcaagcggacctcataaagtatgtcgtagtccggattggagtctgcaactcgactccatgaagtcggaatcgctagtaatcgtagatcagaatgctacggtgaatacgttcccgggccttgtacacaccgcccgtcacaccatgggagtgggttgcaaaagaagtaggtagcttaaccttcgggagggcgcttaccactttgtgattcatgactggggtgaagtcgtaacaaggtaaccgtaggggaacctgcggttggatcacctccttaccttaaagaacctgcctttgtagtgctcacacagattgtctgatgaacgtaaagaagcaaggcgtcttgcgattgagacttcagtgtccccttcgtctagaggcccaggacaccgccctttcacggcggtaacaggggttcgaatcccctaggggacgccacttgctggttcgtgagtgaaagacgcgtgccgatgtatctcaaaactcatcttcgggtgatgtttgagatatttgctctttaaaaatctggatcaagctgaaaattgaaacgacacacagttaatgtgtgttcgagtctctcaaattttcgcaatcagaagtgaaacatcttcgggttgtgaggttaagcgactaagcgtacacggtggatgccctggcagtcagaggcgatgaaggacgtgctaatctgcgaaaagcgtcggtaaggtgatatgaaccgttatagccggcgatgtccgaatggggaaacccagtgcaattcgttgcactatcgttaactgaatacataggttaacgaggcgaaccgggggaactgaaacatctaagtaccccgaggaaaagaaatcaaccgagattcccccagtagcggcgagcgaacggggagcagcccagagtctgaatcagcttgtgtgttagtggaacggtctggaaagtccgacggtacagggtgatagtcccgtacaccaaaatgcacaggttgtgaactcgaagagtagggcgggacacgtggtatcctgtctgaatatggggggaccatcctccaaggctaaatactcctgactgaccgatagtgaaccagtaccgtgagggaaaggcgaaaagaaccccggcgaggggagtgaaaaagaacctgaaaccgtgtacgtacaagcagtgggagcaccttcgggtgtgactgcgtaccttttgtataatgggtcagcgacttatattctgtagcaaggttaaccgtataggggagccgcagggaaaccgagtcttaactgggcgttaagttgcagggtatagacccgaaacccggtgatctagccatgggcaggttgaaggttgggtaacactaactggaggaccgaaccgactaatgttgaaaaattagcggatgacttgtggctgggggtgaaaggccaatcaaaccgggagatagctggttctccccgaaagctatttaggtagcgcctcgtgaactcatcttcgggggtagagcactgtttcggctagggggtcatcccgacttaccaacccgatgcaaactacgaataccgaagaatgttatcacgggagacacacggcgggtgctaacgtccgtcgtgaagagggaaacaacccagaccgccagctaaggtcccaaagtcatggttaagtgggaaacgatgtgggaaggcacagacagccaggatgttggcttagaagcagccatcatttaaagaaagcgtaatagctcactggtcgagtcggcctgcgcggaagatgtaacggggctaaaccatgcaccgaagctgcggcagcgacactatgtgttgttgggtaggggagcgttctgtaagcctgcgaaggtgacctgtgagggttgctggaggtatcagaagtgcgaatgctgacataagtaacgataaagcgggtgaaaagcccgctcgccggaagaccaagggttcctgtccaacgttaatcggggcagggtgagtcgacccctaaggcgaggccgaaaggcgtagtcgatgggaaacaggttaatattcctgtacttggtgttactgcgaaggggggacggagaaggctatgttagccgggcgacggttgtcccggtttaagcatgtaggctgattgtccaggcaaatccggataatcaaggctgaggtgtgatgacgaggcactacggtgctgaagtaacaaatgccctgcttccaggaaaagcctctaagcatcaggtaacattaaatcgtaccccaaaccgacacaggtggtcaggtagagaataccaaggcgcttgagagaactcgggtgaaggaactaggcaaaatggtgccgtaacttcgggagaaggcacgctggtgtgtaggtgaagcccctgcgggtggagctgagaccagtcgaagataccagctggctgcaactgtttattaaaaacacagcactgtgcaaacacgaaagtggacgtatacggtgtgacgcctgcccggtgccggaaggttaattgatggggttatccgtaaggagaagctcttgatcgaagccccggtaaacggcggccgtaactataacggtcctaaggtagcgaaattccttgtcgggtaagttccgacctgcacgaatggcgtaatgatggccaggctgtctccacccgagactcagtgaaattgaactcgctgtgaagatgcagtgtacccgcggcaagacggaaagaccccgtgaacctttactatagcttgacactgaacattgagccttgatgtgtaggataggtgggaggctttgaagcgtggacgccagtctgcgtggagccaaccttgaaataccaccctttaatgtttgatgttctaacgttggccccttaccggggttgcggacagtgtctggtgggtagtttgactggggcggtctcctcccaaagcgtaacggaggagcacgaaggttagctaatcctggtcggacatcaggaggttagtgcaatggcataagctagcttgactgcgagcgtgacggcgcgagcaggtgcgaaagcaggtcatagtgatccggtggttctgaatggaagggccatcgctcaacggataaaaggtactccggggataacaggctgataccgcccaagagttcatatcgacggcggtgtttggcacctcgatgtcggctcatcacatcctggggctgaagtaggtcccaagggtatggctgttcgccatttaaagtggtacgcgagctgggtttagaacgtcgtgagacagttcggtccctatctgccgtgggcgctggagaattgaggggggctgctcctagtacgagaggaccggagtggacgcatcactggtgttcgggttgtcatgccaatggcactgcccggtagctaaatgcggaagagataagtgctgaaagcatctaagcacgaaacttgccccgagatgagttctccctgagactttaagtctcctgaaggaacgttaaagacgatgacgttgataggccgggtgtgtaagcgcagcgatgcgttgagctaaccggtactaatgaaccgtgaggcttaaccttacaacgccgaagatgttttggcgatttgagagaattttcagctctgatacagattaatcgatacgtcggtgagacgtgttgataaaacagaatttgcctggcggcactagcgcggtggtcccacctgaccccatgccgaactcagaagtgaaacgccgtagcgccgatggtagtgtggggtctccccatgtgagagtagggaactgccaggcatcaaataaagcagaaagcccggtcgaaagaccgggctttttgttttatctgttgtttgtcggtgagcgctctccagagtaggacaaatccgccgggagcggatttgaacgttgcgcagcaacggcccggagggtggcgggcaggacgcccgccataaactgccaggcatcaaacaagtgaagagcccatcctgccggatgggctttttgcgtttctgtcgtccggccagcgtgccggtatgcctccgcgcgccgggaaatgtgcgcggaacccctatttgtttatttttctaaatacattcaaatatgtatccgctcatgagacaataaccctgataaatgcttcaataatattgaaaaaggaagagtatgagtattcaacatttccgtgtcgcccttattcccttttttgcggcattttgccttcctgtttttgctcacccagaaacgctggtgaaagtaaaagatgctgaagatcagttgggtgcacgagtgggttacatcgaactggatctcaacagcggtaagatccttgagagttttcgccccgaagaacgttttccaatgatgagcacttttaaagttctgctatgtggcgcggtattatcccgtgttgacgccgggcaagagcaactcggtcgccgcatacactattctcagaatgacttggttgagtactcaccagtcacagaaaagcatcttacggatggcatgacagtaagagaattatgcagtgctgcaataaccatgagtgataacactgcggccaacttacttctgacaacgatcggaggaccgaaggagctaaccgcttttttgcacaacatgggggatcatgtaactcgccttgatcgttgggaaccggagctgaatgaagccataccaaacgacgagcgtgacaccacgatgcctgcagcaatggcaacaacgttgcgcaaactattaactggcgaactacttactctagcttcccggcaacaattaatagactggatggaggcggataaagttgcaggaccacttctgcgctcggcccttccggctagctggtttattgctgataaatctggagccggtgagcgtgggtctcgcggtatcattgcagcactggggccagatggtaagccctcccgtatcgtagttatctacacgacggggagtcaggcaactatggatgaacgaaatagacagatcgctgagataggtgcctcactgattaagcattggtaactgcagaccaagtttactcatatatactttagattgatttaaaacttcatttttaatttaaaaggatctaggtgaagatcctttttgataatctcatgaccaaaatcccttaacgtgagttttcgttccactgagcgtcagaccccgtagaaaagatcaaaggatcttcttgagatcctttttttctgcgcgtaatctgctgcttgcaaacaaaaaaaccaccgctaccagcggtggtttgtttgccggatcaagagctaccaactctttttccgaaggtaactggcttcagcagagcgcagataccaaatactgtccttctagtgtagccgtagttaggccaccacttcaagaactctgtagcaccgcctacatacctcgctctgctaatcctgttaccagtggctgctgccagtggcgataagtcgtgtcttaccgggttggactcaagacgatagttaccggataaggcgcagcggtcgggctgaacggggggttcgtgcacacagcccagcttggagcgaacgacctacaccgaactgagatacctacagcgtgagctatgagaaagcgccacgcttcccgaagggagaaaggcggacaggtatccggtaagcggcagggtcggaacaggagagcgcacgagggagcttccagggggaaacgcctggtatctttatagtcctgtcgggtttcgccacctctgacttgagcgtcgatttttgtgatgctcgtcaggggggcggagcctatggaaaaacgccagcaacgcggcctttttacggttcctggccttttgctgg

SEQ ID NO: 46 - DNA, 7423 bp, Artificial
  Synthetic
agacttagggaccctgcggccgccattaattcctaatttttgttgacactctatcattgatagagttattttaccactccctatcagtgatagagaaaagtgaaatgaatagaccggccgctgagaaaaagcgaagcggcactgctctttaacaatttatcagacaatctgtgtgggcactcgaagatacggattcttaacgtcgcaagacgaaaaatgaataccaagtctcaagagtgaacacgtaattcattacgaagtttaattctttgagcgtcaaacttttaaattgaagagtttgatcatggctcagattgaacgctggcggcaggcctaacacatgcaagtcgagcggtagcacagagagcttgctctcgggtgacgagcggcggacgggtgagtaatgtctgggaaactgcctgatggagggggataactactggaaacggtagctaataccgcataacgtcgcaagaccaaagtgggggaccttcgggcctcatgccatcagatgtgcccagatgggattagctagtaggtggggtaacggctcacctaggcgacgatccctagctggtctgagaggatgaccagccacactggaactgagacacggtccagactcctacgggaggcagcagtggggaatattgcacaatgggcgcaagcctgatgcagccatgccgcgtgtgtgaagaaggccttcgggttgtaaagcactttcagcggggaggaaggcggtgaggttaataacctcatcgattgacgttacccgcagaagaagcaccggctaactccgtgccagcagccgcggtaatacggagggtgcaagcgttaatcggaattactgggcgtaaagcgcacgcaggcggtctgtcaagtcggatgtgaaatccccgggctcaacctgggaactgcattcgaaactggcaggctagagtcttgtagaggggggtagaattccaggtgtagcggtgaaatgcgtagagatctggaggaataccggtggcgaaggcggccccctggacaaagactgacgctcaggtgcgaaagcgtggggagcaaacaggattagataccctggtagtccacgccgtaaacgatgtcgatttggaggttgtgcccttgaggcgtggcttccggagctaacgcgttaaatcgaccgcctggggagtacggccgcaaggttaaaactcaaatgaattgacgggggcccgcacaagcggtggagcatgtggtttaattcgatgcaacgcgaagaaccttacctggtcttgacatccacagaactttccagagatggattggtgccttcgggaactgtgagacaggtgctgcatggctgtcgtcagctcgtgttgtgaaatgttgggttaagtcccgcaacgagcgcaacccttatcctttgttgccagcggttaggccgggaactcaaaggagactgccagtgataaactggaggaaggtggggatgacgtcaagtcatcatggcccttacgaccagggctacacacgtgctacaatggcatatacaaagagaagcgacctcgcgagagcaagcggacctcataaagtatgtcgtagtccggattggagtctgcaactcgactccatgaagtcggaatcgctagtaatcgtagatcagaatgctacggtgaatacgttcccgggccttgtacacaccgcccgtcacaccatgggagtgggttgcaaaagaagtaggtagcttaaccttcgggagggcgcttaccactttgtgattcatgactggggtgaagtcgtaacaaggtaaccgtaggggaacctgcggttggatcacctccttaccttaaagaagcgtactttgtagtgctcacacagattgtctgatagaaagtgaaaagcaaggcgtttacgcgttgggagtgaggctgaagagaataaggccgttcgctttctattaatgaaagctcaccctacacgaaaatatcacgcaacgcgtgataagcaattttcgtgtccccttcgtctagaggcccaggacaccgccctttcacggcggtaacaggggttcgaatcccctaggggacgccacttgctggtttgtgagtgaaagtcgccgaccttaatatctcaaaactcatcttcgggtgatgtttgagatatttgctctttaaaaatctggatcaagctgaaaattgaaacactgaacaacgagagttgttcgtgagtctctcaaattttcgcaacacgatgatgaatcgaaagaaacatcttcgggttgtgagggttgtgaggttaagcgactaagcgtacacggtggatgccctggcagtcagaggcgatgaaggacgtgctaatctgcgaaaagcgtcggtaaggtgatatgaaccgttatagccggcgatgtccgaatggggaaacccagtgcaattcgttgcactatcgttaactgaatacataggttaacgaggcgaaccgggggaactgaaacatctaagtaccccgaggaaaagaaatcaaccgagattcccccagtagcggcgagcgaacggggagcagcccagagtctgaatcagcttgtgtgttagtggaacggtctggaaagtccgacggtacagggtgatagtcccgtacaccaaaatgcacaggttgtgaactcgaagagtagggcgggacacgtggtatcctgtctgaatatggggggaccatcctccaaggctaaatactcctgactgaccgatagtgaaccagtaccgtgagggaaaggcgaaaagaaccccggcgaggggagtgaaaaagaacctgaaaccgtgtacgtacaagcagtgggagcaccttcgggtgtgactgcgtaccttttgtataatgggtcagcgacttatattctgtagcaaggttaaccgtataggggagccgcagggaaaccgagtcttaactgggcgttaagttgcagggtatagacccgaaacccggtgatctagccatgggcaggttgaaggttgggtaacactaactggaggaccgaaccgactaatgttgaaaaattagcggatgacttgtggctgggggtgaaaggccaatcaaaccgggagatagctggttctccccgaaagctatttaggtagcgcctcgtgaactcatcttcgggggtagagcactgtttcggctagggggtcatcccgacttaccaacccgatgcaaactacgaataccgaagaatgttatcacgggagacacacggcgggtgctaacgtccgtcgtgaagagggaaacaacccagaccgccagctaaggtcccaaagtcatggttaagtgggaaacgatgtgggaaggcacagacagccaggatgttggcttagaagcagccatcatttaaagaaagcgtaatagctcactggtcgagtcggcctgcgcggaagatgtaacggggctaaaccatgcaccgaagctgcggcagcgacactatgtgttgttgggtaggggagcgttctgtaagcctgcgaaggtgacctgtgagggttgctggaggtatcagaagtgcgaatgctgacataagtaacgataaagcgggtgaaaagcccgctcgccggaagaccaagggttcctgtccaacgttaatcggggcagggtgagtcgacccctaaggcgaggccgaaaggcgtagtcgatgggaaacaggttaatattcctgtacttggtgttactgcgaaggggggacggagaaggctatgttagccgggcgacggttgtcccggtttaagcatgtaggctgattgtccaggcaaatccggataatcaaggctgaggtgtgatgacgaggcactacggtgctgaagtaacaaatgccctgcttccaggaaaagcctctaagcatcaggtaacattaaatcgtaccccaaaccgacacaggtggtcaggtagagaataccaaggcgcttgagagaactcgggtgaaggaactaggcaaaatggtgccgtaacttcgggagaaggcacgctggtgtgtaggtgaagcccctgcgggtggagctgagaccagtcgaagataccagctggctgcaactgtttattaaaaacacagcactgtgcaaacacgaaagtggacgtatacggtgtgacgcctgcccggtgccggaaggttaattgatggggttatccgtaaggagaagctcttgatcgaagccccggtaaacggcggccgtaactataacggtcctaaggtagcgaaattccttgtcgggtaagttccgacctgcacgaatggcgtaatgatggccaggctgtctccacccgagactcagtgaaattgaactcgctgtgaagatgcagtgtacccgcggcaagacggaaagaccccgtgaacctttactatagcttgacactgaacattgagccttgatgtgtaggataggtgggaggctttgaagcgtggacgccagtctgcgtggagccaaccttgaaataccaccctttaatgtttgatgttctaacgttggccccttaccggggttgcggacagtgtctggtgggtagtttgactggggcggtctcctcccaaagcgtaacggaggagcacgaaggttagctaatcctggtcggacatcaggaggttagtgcaatggcataagctagcttgactgcgagcgtgacggcgcgagcaggtgcgaaagcaggtcatagtgatccggtggttctgaatggaagggccatcgctcaacggataaaaggtactccggggataacaggctgataccgcccaagagttcatatcgacggcggtgtttggcacctcgatgtcggctcatcacatcctggggctgaagtaggtcccaagggtatggctgttcgccatttaaagtggtacgcgagctgggtttagaacgtcgtgagacagttcggtccctatctgccgtgggcgctggagaattgaggggggctgctcctagtacgagaggaccggagtggacgcatcactggtgttcgggttgtcatgccaatggcactgcccggtagctaaatgcggaagagataagtgctgaaagcatctaagcacgaaacttgccccgagatgagttctccctgagactttaagtctcctgaaggaacgttaaagacgatgacgttgataggccgggtgtgtaagcgcagcgatgcgttgagctaaccggtactaatgaaccgtgaggcttaaccttacaacgccgaagctgttttggcggatgagagaagattttcagcctgatacagattaaatcagaacgcagaagcggtctgataaaacagaatttgcctggcggcactagcgcggtggtcccacctgaccccatgccgaactcagaagtgaaacgccgtagcgccgatggtagtgtggggtctccccatgtgagagtagggaactgccaggcatcaaataaaacgaaaggctcagtcgaaagactgggcctttcgttttatctgttgtttgtcggtgaacgctctcctgagtaggacaaatccgccgggagcggatttgaacgttgcgaagcaacggcccggagggtggcgggcaggacgcccgccataaactgccaggcatcaaattaagcagaaggccatcctgacggatggcctttttgcgtttctacaaactcttcctgtcgtcatatctacaagccggcgcgccgggaaatgtgcgcggaacccctatttgtttatttttctaaatacattcaaatatgtatccgctcatgagacaataaccctgataaatgcttcaataatattgaaaaaggaagagtatgagtattcaacatttccgtgtcgcccttattcccttttttgcggcattttgccttcctgtttttgctcacccagaaacgctggtgaaagtaaaagatgctgaagatcagttgggtgcacgagtgggttacatcgaactggatctcaacagcggtaagatccttgagagttttcgccccgaagaacgttttccaatgatgagcacttttaaagttctgctatgtggcgcggtattatcccgtgttgacgccgggcaagagcaactcggtcgccgcatacactattctcagaatgacttggttgagtactcaccagtcacagaaaagcatcttacggatggcatgacagtaagagaattatgcagtgctgcaataaccatgagtgataacactgcggccaacttacttctgacaacgatcggaggaccgaaggagctaaccgcttttttgcacaacatgggggatcatgtaactcgccttgatcgttgggaaccggagctgaatgaagccataccaaacgacgagcgtgacaccacgatgcctgcagcaatggcaacaacgttgcgcaaactattaactggcgaactacttactctagcttcccggcaacaattaatagactggatggaggcggataaagttgcaggaccacttctgcgctcggcccttccggctagctggtttattgctgataaatctggagccggtgagcgtgggtctcgcggtatcattgcagcactggggccagatggtaagccctcccgtatcgtagttatctacacgacggggagtcaggcaactatggatgaacgaaatagacagatcgctgagataggtgcctcactgattaagcattggtaactgcagaccaagtttactcatatatactttagattgatttaaaacttcatttttaatttaaaaggatctaggtgaagatcctttttgataatctcatgaccaaaatcccttaacgtgagttttcgttccactgagcgtcagaccccgtagaaaagatcaaaggatcttcttgagatcctttttttctgcgcgtaatctgctgcttgcaaacaaaaaaaccaccgctaccagcggtggtttgtttgccggatcaagagctaccaactctttttccgaaggtaactggcttcagcagagcgcagataccaaatactgtccttctagtgtagccgtagttaggccaccacttcaagaactctgtagcaccgcctacatacctcgctctgctaatcctgttaccagtggctgctgccagtggcgataagtcgtgtcttaccgggttggactcaagacgatagttaccggataaggcgcagcggtcgggctgaacggggggttcgtgcacacagcccagcttggagcgaacgacctacaccgaactgagatacctacagcgtgagctatgagaaagcgccacgcttcccgaagggagaaaggcggacaggtatccggtaagcggcagggtcggaacaggagagcgcacgagggagcttccagggggaaacgcctggtatctttatagtcctgtcgggtttcgccacctctgacttgagcgtcgatttttgtgatgctcgtcaggggggcggagcctatggaaaaacgccagcaacgcggcctttttacggttcctggccttttgctgg

SEQ ID NO: 47 - DNA, 7320 bp, Artificial
  Synthetic
agacttagggaccctgcggccgccattaattcctaatttttgttgacactctatcattgatagagttattttaccactccctatcagtgatagagaaaagtgaaatgaatagaccggccgctgagaaaaagcgaagcggccggcactgctctttaacaatttatcagacaatctgtgtgggcactcaaagtgacatggattcttaacgtcctcggacgaaaaatgaataccaagtctcaagagtgaacacgtaattcattacgaagtttaattctttgagcatcaaacttaaattgaagagtttgatcatggctcagattgaacgctggcggcaggcctaacacatgcaagtcgagcggtagcacagagagcttgctctcgggtgacgagcggcggacgggtgagtaatgtctgggaaactgcctgatggagggggataactactggaaacggtagctaataccgcataacgtcgcaagaccaaagtgggggaccttcgggcctcatgccatcagatgtgcccagatgggattagctagtaggtggggtaacggctcacctaggcgacgatccctagctggtctgagaggatgaccagccacactggaactgagacacggtccagactcctacgggaggcagcagtggggaatattgcacaatgggcgcaagcctgatgcagccatgccgcgtgtgtgaagaaggccttcgggttgtaaagcactttcagcggggaggaaggcggtgaggttaataacctcatcgattgacgttacccgcagaagaagcaccggctaactccgtgccagcagccgcggtaatacggagggtgcaagcgttaatcggaattactgggcgtaaagcgcacgcaggcggtctgtcaagtcggatgtgaaatccccgggctcaacctgggaactgcattcgaaactggcaggctagagtcttgtagaggggggtagaattccaggtgtagcggtgaaatgcgtagagatctggaggaataccggtggcgaaggcggccccctggacaaagactgacgctcaggtgcgaaagcgtggggagcaaacaggattagataccctggtagtccacgccgtaaacgatgtcgatttggaggttgtgcccttgaggcgtggcttccggagctaacgcgttaaatcgaccgcctggggagtacggccgcaaggttaaaactcaaatgaattgacgggggcccgcacaagcggtggagcatgtggtttaattcgatgcaacgcgaagaaccttacctggtcttgacatccacagaactttccagagatggattggtgccttcgggaactgtgagacaggtgctgcatggctgtcgtcagctcgtgttgtgaaatgttgggttaagtcccgcaacgagcgcaacccttatcctttgttgccagcggttaggccgggaactcaaaggagactgccagtgataaactggaggaaggtggggatgacgtcaagtcatcatggcccttacgaccagggctacacacgtgctacaatggcatatacaaagagaagcgacctcgcgagagcaagcggacctcataaagtatgtcgtagtccggattggagtctgcaactcgactccatgaagtcggaatcgctagtaatcgtagatcagaatgctacggtgaatacgttcccgggccttgtacacaccgcccgtcacaccatgggagtgggttgcaaaagaagtaggtagcttaaccttcgggagggcgcttaccactttgtgattcatgactggggtgaagtcgtaacaaggtaaccgtaggggaacctgcggttggatcatgtggttaccttaaagaacctgcctttgtagtgctcacacagattgtctgatgaacgtaaagaagcaaggcgtcttgcgattgagacttcagtgtccccttcgtctagaggcccaggacaccgccctttcacggcggtaacaggggttcgaatcccctaggggacgccacttgctggttcgtgagtgaaagacgcgtgccgatgtatctcaaaactcatcttcgggtgatgtttgagatatttgctctttaaaaatctggatcaagctgaaaattgaaacgacacacagttaatgtgtgttcgagtctctcaaattttcgcaatcagaagtgaaacatcttcgggttgtgaggttaagcgactaagcgtacacggtggatgccctggcagtcagaggcgatgaaggacgtgctaatctgcgaaaagcgtcggtaaggtgatatgaaccgttatagccggcgatgtccgaatggggaaacccagtgcaattcgttgcactatcgttaactgaatacataggttaacgaggcgaaccgggggaactgaaacatctaagtaccccgaggaaaagaaatcaaccgagattcccccagtagcggcgagcgaacggggagcagcccagagtctgaatcagcttgtgtgttagtggaacggtctggaaagtccgacggtacagggtgatagtcccgtacaccaaaatgcacaggttgtgaactcgaagagtagggcgggacacgtggtatcctgtctgaatatggggggaccatcctccaaggctaaatactcctgactgaccgatagtgaaccagtaccgtgagggaaaggcgaaaagaaccccggcgaggggagtgaaaaagaacctgaaaccgtgtacgtacaagcagtgggagcaccttcgggtgtgactgcgtaccttttgtataatgggtcagcgacttatattctgtagcaaggttaaccgtataggggagccgcagggaaaccgagtcttaactgggcgttaagttgcagggtatagacccgaaacccggtgatctagccatgggcaggttgaaggttgggtaacactaactggaggaccgaaccgactaatgttgaaaaattagcggatgacttgtggctgggggtgaaaggccaatcaaaccgggagatagctggttctccccgaaagctatttaggtagcgcctcgtgaactcatcttcgggggtagagcactgtttcggctagggggtcatcccgacttaccaacccgatgcaaactacgaataccgaagaatgttatcacgggagacacacggcgggtgctaacgtccgtcgtgaagagggaaacaacccagaccgccagctaaggtcccaaagtcatggttaagtgggaaacgatgtgggaaggcacagacagccaggatgttggcttagaagcagccatcatttaaagaaagcgtaatagctcactggtcgagtcggcctgcgcggaagatgtaacggggctaaaccatgcaccgaagctgcggcagcgacactatgtgttgttgggtaggggagcgttctgtaagcctgcgaaggtgacctgtgagggttgctggaggtatcagaagtgcgaatgctgacataagtaacgataaagcgggtgaaaagcccgctcgccggaagaccaagggttcctgtccaacgttaatcggggcagggtgagtcgacccctaaggcgaggccgaaaggcgtagtcgatgggaaacaggttaatattcctgtacttggtgttactgcgaaggggggacggagaaggctatgttagccgggcgacggttgtcccggtttaagcatgtaggctgattgtccaggcaaatccggataatcaaggctgaggtgtgatgacgaggcactacggtgctgaagtaacaaatgccctgcttccaggaaaagcctctaagcatcaggtaacattaaatcgtaccccaaaccgacacaggtggtcaggtagagaataccaaggcgcttgagagaactcgggtgaaggaactaggcaaaatggtgccgtaacttcgggagaaggcacgctggtgtgtaggtgaagcccctgcgggtggagctgagaccagtcgaagataccagctggctgcaactgtttattaaaaacacagcactgtgcaaacacgaaagtggacgtatacggtgtgacgcctgcccggtgccggaaggttaattgatggggttatccgtaaggagaagctcttgatcgaagccccggtaaacggcggccgtaactataacggtcctaaggtagcgaaattccttgtcgggtaagttccgacctgcacgaatggcgtaatgatggccaggctgtctccacccgagactcagtgaaattgaactcgctgtgaagatgcagtgtacccgcggcaagacggaaagaccccgtgaacctttactatagcttgacactgaacattgagccttgatgtgtaggataggtgggaggctttgaagcgtggacgccagtctgcgtggagccaaccttgaaataccaccctttaatgtttgatgttctaacgttggccccttaccggggttgcggacagtgtctggtgggtagtttgactggggcggtctcctcccaaagcgtaacggaggagcacgaaggttagctaatcctggtcggacatcaggaggttagtgcaatggcataagctagcttgactgcgagcgtgacggcgcgagcaggtgcgaaagcaggtcatagtgatccggtggttctgaatggaagggccatcgctcaacggataaaaggtactccggggataacaggctgataccgcccaagagttcatatcgacggcggtgtttggcacctcgatgtcggctcatcacatcctggggctgaagtaggtcccaagggtatggctgttcgccatttaaagtggtacgcgagctgggtttagaacgtcgtgagacagttcggtccctatctgccgtgggcgctggagaattgaggggggctgctcctagtacgagaggaccggagtggacgcatcactggtgttcgggttgtcatgccaatggcactgcccggtagctaaatgcggaagagataagtgctgaaagcatctaagcacgaaacttgccccgagatgagttctccctgagactttaagtctcctgaaggaacgttaaagacgatgacgttgataggccgggtgtgtaagcgcagcgatgcgttgagctaaccggtactaatgaaccgtgaggcttaaccttacaacgccgaagatgttttggcgatttgagagaattttcagctctgatacagattaatcgatacgtcggtgagacgtgttgataaaacagaatttgcctggcggcactagcgcggtggtcccacctgaccccatgccgaactcagaagtgaaacgccgtagcgccgatggtagtgtggggtctccccatgtgagagtagggaactgccaggcatcaaataaagcagaaagcccggtcgaaagaccgggctttttgttttatctgttgtttgtcggtgagcgctctccagagtaggacaaatccgccgggagcggatttgaacgttgcgcagcaacggcccggagggtggcgggcaggacgcccgccataaactgccaggcatcaaacaagtgaagagcccatcctgccggatgggctttttgcgtttctgtcgtccggccagcgtgccggtatgcctccgcgcgccgggaaatgtgcgcggaacccctatttgtttatttttctaaatacattcaaatatgtatccgctcatgagacaataaccctgataaatgcttcaataatattgaaaaaggaagagtatgagtattcaacatttccgtgtcgcccttattcccttttttgcggcattttgccttcctgtttttgctcacccagaaacgctggtgaaagtaaaagatgctgaagatcagttgggtgcacgagtgggttacatcgaactggatctcaacagcggtaagatccttgagagttttcgccccgaagaacgttttccaatgatgagcacttttaaagttctgctatgtggcgcggtattatcccgtgttgacgccgggcaagagcaactcggtcgccgcatacactattctcagaatgacttggttgagtactcaccagtcacagaaaagcatcttacggatggcatgacagtaagagaattatgcagtgctgcaataaccatgagtgataacactgcggccaacttacttctgacaacgatcggaggaccgaaggagctaaccgcttttttgcacaacatgggggatcatgtaactcgccttgatcgttgggaaccggagctgaatgaagccataccaaacgacgagcgtgacaccacgatgcctgcagcaatggcaacaacgttgcgcaaactattaactggcgaactacttactctagcttcccggcaacaattaatagactggatggaggcggataaagttgcaggaccacttctgcgctcggcccttccggctagctggtttattgctgataaatctggagccggtgagcgtgggtctcgcggtatcattgcagcactggggccagatggtaagccctcccgtatcgtagttatctacacgacggggagtcaggcaactatggatgaacgaaatagacagatcgctgagataggtgcctcactgattaagcattggtaactgcagaccaagtttactcatatatactttagattgatttaaaacttcatttttaatttaaaaggatctaggtgaagatcctttttgataatctcatgaccaaaatcccttaacgtgagttttcgttccactgagcgtcagaccccgtagaaaagatcaaaggatcttcttgagatcctttttttctgcgcgtaatctgctgcttgcaaacaaaaaaaccaccgctaccagcggtggtttgtttgccggatcaagagctaccaactctttttccgaaggtaactggcttcagcagagcgcagataccaaatactgtccttctagtgtagccgtagttaggccaccacttcaagaactctgtagcaccgcctacatacctcgctctgctaatcctgttaccagtggctgctgccagtggcgataagtcgtgtcttaccgggttggactcaagacgatagttaccggataaggcgcagcggtcgggctgaacggggggttcgtgcacacagcccagcttggagcgaacgacctacaccgaactgagatacctacagcgtgagctatgagaaagcgccacgcttcccgaagggagaaaggcggacaggtatccggtaagcggcagggtcggaacaggagagcgcacgagggagcttccagggggaaacgcctggtatctttatagtcctgtcgggtttcgccacctctgacttgagcgtcgatttttgtgatgctcgtcaggggggcggagcctatggaaaaacgccagcaacgcggcctttttacggttcctggccttttgctgg

SEQ ID NO: 48 - DNA, 7423 bp, Artificial
  Synthetic
agacttagggaccctgcggccgccattaattcctaatttttgttgacactctatcattgatagagttattttaccactccctatcagtgatagagaaaagtgaaatgaatagaccggccgctgagaaaaagcgaagcggcactgctctttaacaatttatcagacaatctgtgtgggcactcgaagatacggattcttaacgtcgcaagacgaaaaatgaataccaagtctcaagagtgaacacgtaattcattacgaagtttaattctttgagcgtcaaacttttaaattgaagagtttgatcatggctcagattgaacgctggcggcaggcctaacacatgcaagtcgagcggtagcacagagagcttgctctcgggtgacgagcggcggacgggtgagtaatgtctgggaaactgcctgatggagggggataactactggaaacggtagctaataccgcataacgtcgcaagaccaaagtgggggaccttcgggcctcatgccatcagatgtgcccagatgggattagctagtaggtggggtaacggctcacctaggcgacgatccctagctggtctgagaggatgaccagccacactggaactgagacacggtccagactcctacgggaggcagcagtggggaatattgcacaatgggcgcaagcctgatgcagccatgccgcgtgtgtgaagaaggccttcgggttgtaaagcactttcagcggggaggaaggcggtgaggttaataacctcatcgattgacgttacccgcagaagaagcaccggctaactccgtgccagcagccgcggtaatacggagggtgcaagcgttaatcggaattactgggcgtaaagcgcacgcaggcggtctgtcaagtcggatgtgaaatccccgggctcaacctgggaactgcattcgaaactggcaggctagagtcttgtagaggggggtagaattccaggtgtagcggtgaaatgcgtagagatctggaggaataccggtggcgaaggcggccccctggacaaagactgacgctcaggtgcgaaagcgtggggagcaaacaggattagataccctggtagtccacgccgtaaacgatgtcgatttggaggttgtgcccttgaggcgtggcttccggagctaacgcgttaaatcgaccgcctggggagtacggccgcaaggttaaaactcaaatgaattgacgggggcccgcacaagcggtggagcatgtggtttaattcgatgcaacgcgaagaaccttacctggtcttgacatccacagaactttccagagatggattggtgccttcgggaactgtgagacaggtgctgcatggctgtcgtcagctcgtgttgtgaaatgttgggttaagtcccgcaacgagcgcaacccttatcctttgttgccagcggttaggccgggaactcaaaggagactgccagtgataaactggaggaaggtggggatgacgtcaagtcatcatggcccttacgaccagggctacacacgtgctacaatggcatatacaaagagaagcgacctcgcgagagcaagcggacctcataaagtatgtcgtagtccggattggagtctgcaactcgactccatgaagtcggaatcgctagtaatcgtagatcagaatgctacggtgaatacgttcccgggccttgtacacaccgcccgtcacaccatgggagtgggttgcaaaagaagtaggtagcttaaccttcgggagggcgcttaccactttgtgattcatgactggggtgaagtcgtaacaaggtaaccgtaggggaacctgcggttggatcatgtggttaccttaaagaagcgtactttgtagtgctcacacagattgtctgatagaaagtgaaaagcaaggcgtttacgcgttgggagtgaggctgaagagaataaggccgttcgctttctattaatgaaagctcaccctacacgaaaatatcacgcaacgcgtgataagcaattttcgtgtccccttcgtctagaggcccaggacaccgccctttcacggcggtaacaggggttcgaatcccctaggggacgccacttgctggtttgtgagtgaaagtcgccgaccttaatatctcaaaactcatcttcgggtgatgtttgagatatttgctctttaaaaatctggatcaagctgaaaattgaaacactgaacaacgagagttgttcgtgagtctctcaaattttcgcaacacgatgatgaatcgaaagaaacatcttcgggttgtgagggttgtgaggttaagcgactaagcgtacacggtggatgccctggcagtcagaggcgatgaaggacgtgctaatctgcgaaaagcgtcggtaaggtgatatgaaccgttatagccggcgatgtccgaatggggaaacccagtgcaattcgttgcactatcgttaactgaatacataggttaacgaggcgaaccgggggaactgaaacatctaagtaccccgaggaaaagaaatcaaccgagattcccccagtagcggcgagcgaacggggagcagcccagagtctgaatcagcttgtgtgttagtggaacggtctggaaagtccgacggtacagggtgatagtcccgtacaccaaaatgcacaggttgtgaactcgaagagtagggcgggacacgtggtatcctgtctgaatatggggggaccatcctccaaggctaaatactcctgactgaccgatagtgaaccagtaccgtgagggaaaggcgaaaagaaccccggcgaggggagtgaaaaagaacctgaaaccgtgtacgtacaagcagtgggagcaccttcgggtgtgactgcgtaccttttgtataatgggtcagcgacttatattctgtagcaaggttaaccgtataggggagccgcagggaaaccgagtcttaactgggcgttaagttgcagggtatagacccgaaacccggtgatctagccatgggcaggttgaaggttgggtaacactaactggaggaccgaaccgactaatgttgaaaaattagcggatgacttgtggctgggggtgaaaggccaatcaaaccgggagatagctggttctccccgaaagctatttaggtagcgcctcgtgaactcatcttcgggggtagagcactgtttcggctagggggtcatcccgacttaccaacccgatgcaaactacgaataccgaagaatgttatcacgggagacacacggcgggtgctaacgtccgtcgtgaagagggaaacaacccagaccgccagctaaggtcccaaagtcatggttaagtgggaaacgatgtgggaaggcacagacagccaggatgttggcttagaagcagccatcatttaaagaaagcgtaatagctcactggtcgagtcggcctgcgcggaagatgtaacggggctaaaccatgcaccgaagctgcggcagcgacactatgtgttgttgggtaggggagcgttctgtaagcctgcgaaggtgacctgtgagggttgctggaggtatcagaagtgcgaatgctgacataagtaacgataaagcgggtgaaaagcccgctcgccggaagaccaagggttcctgtccaacgttaatcggggcagggtgagtcgacccctaaggcgaggccgaaaggcgtagtcgatgggaaacaggttaatattcctgtacttggtgttactgcgaaggggggacggagaaggctatgttagccgggcgacggttgtcccggtttaagcatgtaggctgattgtccaggcaaatccggataatcaaggctgaggtgtgatgacgaggcactacggtgctgaagtaacaaatgccctgcttccaggaaaagcctctaagcatcaggtaacattaaatcgtaccccaaaccgacacaggtggtcaggtagagaataccaaggcgcttgagagaactcgggtgaaggaactaggcaaaatggtgccgtaacttcgggagaaggcacgctggtgtgtaggtgaagcccctgcgggtggagctgagaccagtcgaagataccagctggctgcaactgtttattaaaaacacagcactgtgcaaacacgaaagtggacgtatacggtgtgacgcctgcccggtgccggaaggttaattgatggggttatccgtaaggagaagctcttgatcgaagccccggtaaacggcggccgtaactataacggtcctaaggtagcgaaattccttgtcgggtaagttccgacctgcacgaatggcgtaatgatggccaggctgtctccacccgagactcagtgaaattgaactcgctgtgaagatgcagtgtacccgcggcaagacggaaagaccccgtgaacctttactatagcttgacactgaacattgagccttgatgtgtaggataggtgggaggctttgaagcgtggacgccagtctgcgtggagccaaccttgaaataccaccctttaatgtttgatgttctaacgttggccccttaccggggttgcggacagtgtctggtgggtagtttgactggggcggtctcctcccaaagcgtaacggaggagcacgaaggttagctaatcctggtcggacatcaggaggttagtgcaatggcataagctagcttgactgcgagcgtgacggcgcgagcaggtgcgaaagcaggtcatagtgatccggtggttctgaatggaagggccatcgctcaacggataaaaggtactccggggataacaggctgataccgcccaagagttcatatcgacggcggtgtttggcacctcgatgtcggctcatcacatcctggggctgaagtaggtcccaagggtatggctgttcgccatttaaagtggtacgcgagctgggtttagaacgtcgtgagacagttcggtccctatctgccgtgggcgctggagaattgaggggggctgctcctagtacgagaggaccggagtggacgcatcactggtgttcgggttgtcatgccaatggcactgcccggtagctaaatgcggaagagataagtgctgaaagcatctaagcacgaaacttgccccgagatgagttctccctgagactttaagtctcctgaaggaacgttaaagacgatgacgttgataggccgggtgtgtaagcgcagcgatgcgttgagctaaccggtactaatgaaccgtgaggcttaaccttacaacgccgaagctgttttggcggatgagagaagattttcagcctgatacagattaaatcagaacgcagaagcggtctgataaaacagaatttgcctggcggcactagcgcggtggtcccacctgaccccatgccgaactcagaagtgaaacgccgtagcgccgatggtagtgtggggtctccccatgtgagagtagggaactgccaggcatcaaataaaacgaaaggctcagtcgaaagactgggcctttcgttttatctgttgtttgtcggtgaacgctctcctgagtaggacaaatccgccgggagcggatttgaacgttgcgaagcaacggcccggagggtggcgggcaggacgcccgccataaactgccaggcatcaaattaagcagaaggccatcctgacggatggcctttttgcgtttctacaaactcttcctgtcgtcatatctacaagccggcgcgccgggaaatgtgcgcggaacccctatttgtttatttttctaaatacattcaaatatgtatccgctcatgagacaataaccctgataaatgcttcaataatattgaaaaaggaagagtatgagtattcaacatttccgtgtcgcccttattcccttttttgcggcattttgccttcctgtttttgctcacccagaaacgctggtgaaagtaaaagatgctgaagatcagttgggtgcacgagtgggttacatcgaactggatctcaacagcggtaagatccttgagagttttcgccccgaagaacgttttccaatgatgagcacttttaaagttctgctatgtggcgcggtattatcccgtgttgacgccgggcaagagcaactcggtcgccgcatacactattctcagaatgacttggttgagtactcaccagtcacagaaaagcatcttacggatggcatgacagtaagagaattatgcagtgctgcaataaccatgagtgataacactgcggccaacttacttctgacaacgatcggaggaccgaaggagctaaccgcttttttgcacaacatgggggatcatgtaactcgccttgatcgttgggaaccggagctgaatgaagccataccaaacgacgagcgtgacaccacgatgcctgcagcaatggcaacaacgttgcgcaaactattaactggcgaactacttactctagcttcccggcaacaattaatagactggatggaggcggataaagttgcaggaccacttctgcgctcggcccttccggctagctggtttattgctgataaatctggagccggtgagcgtgggtctcgcggtatcattgcagcactggggccagatggtaagccctcccgtatcgtagttatctacacgacggggagtcaggcaactatggatgaacgaaatagacagatcgctgagataggtgcctcactgattaagcattggtaactgcagaccaagtttactcatatatactttagattgatttaaaacttcatttttaatttaaaaggatctaggtgaagatcctttttgataatctcatgaccaaaatcccttaacgtgagttttcgttccactgagcgtcagaccccgtagaaaagatcaaaggatcttcttgagatcctttttttctgcgcgtaatctgctgcttgcaaacaaaaaaaccaccgctaccagcggtggtttgtttgccggatcaagagctaccaactctttttccgaaggtaactggcttcagcagagcgcagataccaaatactgtccttctagtgtagccgtagttaggccaccacttcaagaactctgtagcaccgcctacatacctcgctctgctaatcctgttaccagtggctgctgccagtggcgataagtcgtgtcttaccgggttggactcaagacgatagttaccggataaggcgcagcggtcgggctgaacggggggttcgtgcacacagcccagcttggagcgaacgacctacaccgaactgagatacctacagcgtgagctatgagaaagcgccacgcttcccgaagggagaaaggcggacaggtatccggtaagcggcagggtcggaacaggagagcgcacgagggagcttccagggggaaacgcctggtatctttatagtcctgtcgggtttcgccacctctgacttgagcgtcgatttttgtgatgctcgtcaggggggcggagcctatggaaaaacgccagcaacgcggcctttttacggttcctggccttttgctgg

SEQ ID NO: 49 - DNA, 7501 bp, Artificial
  Synthetic
agacttagggaccctgcggccgccattaattcctaatttttgttgacactctatcattgatagagttattttaccactccctatcagtgatagagaaaagtgaaatgaatagaccggccgctgagaaaaagcgaagcggcgcactgctctttaacaatttatcagacaatctgtgtgggcactcaaagtgacatggattcttaacgtcttcggacgaaaaatgaataccaagtctcaaagagtgaacacgtaattcattacgaagtttaattctacgagcatcaaacttaaattgaagagtttgatcatggctcagattgaacgctggcggcaggcctaacacatgcaagtcgaacggtagcacagagagcttgctctcgggtgacgagtggcggacgggtgagtaatgtctgggaaactgcccgatggagggggataactactggaaacggtagctaataccgcataacgtcgcaagaccaaagagggggaccttcgggcctcttgccatcggatgtgcccagatgggattagcttgtaggtgaggtaacggctcacctaggcgacgatccctagctggtctgagaggatgaccagccacactggaactgagacacggtccagactcctacgggaggcagcagtggggaatattgcacaatgggcgcaagcctgatgcagccatgccgcgtgtatgaagaaggccttcgggttgtaaagtactttcagcggggaggaagggagtgaggttaataacctcattcattgacgttacccgcagaagaagcaccggctaactccgtgccagcagccgcggtaatacggagggtgcaagcgttaatcggaattactgggcgtaaagcgcacgcaggcggtctgtcaagtcggatgtgaaatccccgggctcaacctgggaactgcattcgaaactggcaggctggagtcttgtagaggggggtagaattccaggtgtagcggtgaaatgcgtagagatctggaggaataccggtggcgaaggcggccccctggacaaagactgacgctcaggtgcgaaagcgtggggagcaaacaggattagataccctggtagtccacgctgtaaacgatgtcgacttggaggttgttcccttgaggagtggcttccggagctaacgcgttaagtcgaccgcctggggagtacggccgcaaggttaaaactcaaatgaattgacgggggcccgcacaagcggtggagcatgtggtttaattcgatgcaacgcgaagaaccttacctactcttgacatccagagaacttagcagagatgctttggtgccttcgggaactctgagacaggtgctgcatggctgtcgtcagctcgtgttgtgaaatgttgggttaagtcccgcaacgagcgcaacccttatcctttgttgccagcgattcggtcgggaactcaaaggagactgccagtgataaactggaggaaggtggggatgacgtcaagtcatcatggcccttacgagtagggctacacacgtgctacaatggcatatacaaagagaagcgacctcgcgagagcaagcggacctcataaagtatgtcgtagtccggattggagtctgcaactcgactccatgaagtcggaatcgctagtaatcgtggatcagaatgccacggtgaatacgttcccgggccttgtacacaccgcccgtcacaccatgggagtgggttgcaaaagaagtaggtagcttaaccttcgggagggcgcttaccactttgtgattcatgactggggtgaagtcgtaacaaggtaaccgtaggggaacctgcggttggatcacctccttaccttaaagaacctgcctttgtagtgctcacacagattgtctgatagatgtaaagaagcaagacggctgcgaagtcgcgacacctcgtgtccccttcgtctagcggttaggactccgccctttcacggcggcaacaggggttcgaatcccctaggggacgccacttgctggctgtgagtgaaaggcacaaccaaccgatatctcaaaactcatcttcgggtgacgtttgagatatttgctctttaaaaatctggatcaagctgaaaattgaaacgacacactgttcaagtgtgttcgagtctctcaaattttcgcgacacgacgatgtttcacgaaacatcttcgggttgtgaggttaagcgactaagcgtacacggtggatgccctggcagtcagaggcgatgaaggacgtgctaatctgcgaaaagcgtcggtaaggtgatatgaaccgttacagccggcgatgtccgaatggggaaacccagtgcaattcgttgcactatcgtttgatgaatacatagtcaaacgaggcgaaccgggggaactgaaacatctaagtaccccgaggaaaagaaatcaaccgagattcccccagtagcggcgagcgaacggggagcagcccggagtctgaatcagcttgtgtgttagtggaagcgtctggaaagtcgcagggtacagggtgatactcccgtacactaaaacacacaggctgtgaactcgaagagtagggcgggacacgtggtatcctgtctgaatatggggggaccatcctccaaggctaaatactcctgactgaccgatagtgaaccagtaccgtgagggaaaggcgaaaagaaccccggcgaggggagtgaaaaagaacctgaaaccgtgtacgtacaagcagtaggagccccaccaccaaagcgtttcgctttgcgtggtgcgcaaaatgcgtaacgacagcatgatggacggttaacggagcgtcagcgacgttcaacctcaaaaatcaggcagtggagcgttttggggtggggtgactgcgtaccttttgtataatgggtcagcgacttatattctgtagcaaggttaaccgtataggggagccgcagggaaaccgagtcttaactgggcgttaagttgcagggtatagacccgaaacccggtgatctagccatgggcaggttgaaggttgggtaacactaactggaggaccgaaccgactaatgttgaaaaattagcggatgacttgtggctgggggtgaaaggccaatcaaaccgggagatagctggttctccccgaaagctatttaggtagcgcctcgtgaactcatcttcgggggtagagcactgtttcggctagggggtcatcccgacttaccaacccgatgcaaactacgaataccgaagaatgttatcacgggagacacacggcgggtgctaacgtccgtcgtgaagagggaaacaacccagaccgccagctaaggtcccaaagtcatggttaagtgggaaacgatgtgggaaggcccagacagccaggatgttggcttagaagcagccatcatttaaagaaagcgtaatagctcactggtcgagtcggcctgcgcggaagatgtaacggggctaaaccatgcaccgaagctgcggcagcgacactatgtgttgttgggtaggggagcgttctgtaagccgttgaaggtggcctgtgagggttgctggaggtatcagaagtgcgaatgctgacataagtaacgataatgcgggtgaaaaacccgcacgccggaagaccaagggttcctgtccaacgttaatcggggcagggtgagtcgacccctaaggcgaggccgaaaggcgtagtcgatgggaaacaggttaatattcctgtacttggtgttactgcgaaggggggacggagaaggctatgttggccgggcgacggttgtcccggtttaagcatgtaggcggatgttccaggtaaatccggaacgttactaacgctgaggtgtgatgacgaggcactacggtgctgaagtgacaaatgccctgcttccaggaaaagcctctaagcatcaggtaacatcaaatcgtaccccaaaccgacacaggtggtcaggtagagaataccaaggcgcttgagagaactcgggtgaaggaactaggcaaaatggtgccgtaacttcgggagaaggcacgctgatggtaagtgaagtgacttgctcacggagctgaaatcagtcgaagataccagctggctgcaactgtttattaaaaacacagcactgtgcaaacacgaaagtggacgtatacggtgtgacgcctgcccggtgccggaaggttaattgatggggttatcctcacggagaagctcttgatcgaagccccggtaaacggcggccgtaactataacggtcctaaggtagcgaaattccttgtcgggtaagttccgacctgcacgaatggcgtaatgatggccaggctgtctccacccgagactcagtgaaattgaactcgctgtgaagatgcagtgtacccgcggcaagacggaaagaccccgtgaacctttactatagcttgacactgaacactggtccttgatgtgtaggataggtgggaggctttgaagtgtggacgccagtctgcatggagccatccttgaaataccaccctttaatggctggtgttctaacgtgggcccgtgatccgggttgcggacagtgtctggtgggtagtttgactggggcggtctcctcctaaagagtaacggaggagcacgaaggtcagctaatcctggtcggacatcaggaggttagtgcaatggcataagctggcttgactgcgagcgtgacggcgcgagcaggtgcgaaagcaggtcatagtgatccggtggttctgaatggaagggccatcgctcaacggataaaaggtactccggggataacaggctgataccgcccaagagttcatatcgacggcggtgtttggcacctcgatgtcggctcatcacatcctggggctgaagtaggtcccaagggtatggctgttcgccatttaaagtggtacgcgagctgggtttagaacgtcgtgagacagttcggtccctatctgccgtgggcgctggagaattgaggggggctgctcctagtacgagaggaccggagtggacgcatcactggtgttcgggttgtcatgccaatggcattgcccggtagctaaatgcggaagagataagtgctgaaagcatctaagcacgaaacttgccccgagatgagttctccctgactccttgagagtcctgaaggaacgttgaagacgacgacgttgataggccgggtgtgtaagcgcagcgatgcgttgagctaaccggtactaatgaaccgtgaggcttaaccttacaacgccgaagatgttttggcgatttgagagaagattttcagcttagattccggattttcgggaacgaaaggttttacgctgaggcaaggcggcaaatgaagaaaaggaaggagcatactgtagtatgtgactgactttacgaatgcagccaacgcagcatcggtgtaaaagattcgtttctgacaacagaatttgcctggcggcagtagcgcggtggtcccacctgaccccatgccgaactcagaagtgaaacgccgtagcgccgatggtagtgtggggtctccccatgtgagagtagggaactgccaggcatcaaacaagtgaagagcccatcctgacggatgggctttttgcgttttagtcgtctgaaactgtcggatatcgttctccctgtatccaatatccctcatgaatcctgccggatttatgctgtctccctgtataagatccagagtaattccttctccacattccagacttatgtaccaggcttataatgtctatcagccagcgcgcgccgggaaatgtgcgcggaacccctatttgtttatttttctaaatacattcaaatatgtatccgctcatgagacaataaccctgataaatgcttcaataatattgaaaaaggaagagtatgagtattcaacatttccgtgtcgcccttattcccttttttgcggcattttgccttcctgtttttgctcacccagaaacgctggtgaaagtaaaagatgctgaagatcagttgggtgcacgagtgggttacatcgaactggatctcaacagcggtaagatccttgagagttttcgccccgaagaacgttttccaatgatgagcacttttaaagttctgctatgtggcgcggtattatcccgtgttgacgccgggcaagagcaactcggtcgccgcatacactattctcagaatgacttggttgagtactcaccagtcacagaaaagcatcttacggatggcatgacagtaagagaattatgcagtgctgcaataaccatgagtgataacactgcggccaacttacttctgacaacgatcggaggaccgaaggagctaaccgcttttttgcacaacatgggggatcatgtaactcgccttgatcgttgggaaccggagctgaatgaagccataccaaacgacgagcgtgacaccacgatgcctgcagcaatggcaacaacgttgcgcaaactattaactggcgaactacttactctagcttcccggcaacaattaatagactggatggaggcggataaagttgcaggaccacttctgcgctcggcccttccggctagctggtttattgctgataaatctggagccggtgagcgtgggtctcgcggtatcattgcagcactggggccagatggtaagccctcccgtatcgtagttatctacacgacggggagtcaggcaactatggatgaacgaaatagacagatcgctgagataggtgcctcactgattaagcattggtaactgcagaccaagtttactcatatatactttagattgatttaaaacttcatttttaatttaaaaggatctaggtgaagatcctttttgataatctcatgaccaaaatcccttaacgtgagttttcgttccactgagcgtcagaccccgtagaaaagatcaaaggatcttcttgagatcctttttttctgcgcgtaatctgctgcttgcaaacaaaaaaaccaccgctaccagcggtggtttgtttgccggatcaagagctaccaactctttttccgaaggtaactggcttcagcagagcgcagataccaaatactgtccttctagtgtagccgtagttaggccaccacttcaagaactctgtagcaccgcctacatacctcgctctgctaatcctgttaccagtggctgctgccagtggcgataagtcgtgtcttaccgggttggactcaagacgatagttaccggataaggcgcagcggtcgggctgaacggggggttcgtgcacacagcccagcttggagcgaacgacctacaccgaactgagatacctacagcgtgagctatgagaaagcgccacgcttcccgaagggagaaaggcggacaggtatccggtaagcggcagggtcggaacaggagagcgcacgagggagcttccagggggaaacgcctggtatctttatagtcctgtcgggtttcgccacctctgacttgagcgtcgatttttgtgatgctcgtcaggggggcggagcctatggaaaaacgccagcaacgcggcctttttacggttcctggccttttgctgg

SEQ ID NO: 50 - DNA, 7531 bp, Artificial
  Synthetic
agacttagggaccctgcggccgccattaattcctaatttttgttgacactctatcattgatagagttattttaccactccctatcagtgatagagaaaagtgaaatgaatagaccggccgctgagaaaaagcgaagcggcactgctctttaacaatttatcagacaatctgtgtgggcactcgaagatacggattcttaacgtcgcaagacgaaaaatgaataccaagtctcaagagtgaacacgtaattcattacgaagtttaattctttgagcgtcaaacttttaaattgaagagtttgatcatggctcagattgaacgctggcggcaggcctaacacatgcaagtcgaacggtagcacagagagcttgctctcgggtgacgagtggcggacgggtgagtaatgtctgggaaactgcccgatggagggggataactactggaaacggtagctaataccgcataacgtcgcaagaccaaagagggggaccttcgggcctcttgccatcggatgtgcccagatgggattagcttgtaggtgaggtaacggctcacctaggcgacgatccctagctggtctgagaggatgaccagccacactggaactgagacacggtccagactcctacgggaggcagcagtggggaatattgcacaatgggcgcaagcctgatgcagccatgccgcgtgtatgaagaaggccttcgggttgtaaagtactttcagcggggaggaagggagtgaggttaataacctcattcattgacgttacccgcagaagaagcaccggctaactccgtgccagcagccgcggtaatacggagggtgcaagcgttaatcggaattactgggcgtaaagcgcacgcaggcggtctgtcaagtcggatgtgaaatccccgggctcaacctgggaactgcattcgaaactggcaggctggagtcttgtagaggggggtagaattccaggtgtagcggtgaaatgcgtagagatctggaggaataccggtggcgaaggcggccccctggacaaagactgacgctcaggtgcgaaagcgtggggagcaaacaggattagataccctggtagtccacgctgtaaacgatgtcgacttggaggttgttcccttgaggagtggcttccggagctaacgcgttaagtcgaccgcctggggagtacggccgcaaggttaaaactcaaatgaattgacgggggcccgcacaagcggtggagcatgtggtttaattcgatgcaacgcgaagaaccttacctactcttgacatccagagaacttagcagagatgctttggtgccttcgggaactctgagacaggtgctgcatggctgtcgtcagctcgtgttgtgaaatgttgggttaagtcccgcaacgagcgcaacccttatcctttgttgccagcgattcggtcgggaactcaaaggagactgccagtgataaactggaggaaggtggggatgacgtcaagtcatcatggcccttacgagtagggctacacacgtgctacaatggcatatacaaagagaagcgacctcgcgagagcaagcggacctcataaagtatgtcgtagtccggattggagtctgcaactcgactccatgaagtcggaatcgctagtaatcgtggatcagaatgccacggtgaatacgttcccgggccttgtacacaccgcccgtcacaccatgggagtgggttgcaaaagaagtaggtagcttaaccttcgggagggcgcttaccactttgtgattcatgactggggtgaagtcgtaacaaggtaaccgtaggggaacctgcggttggatcacctccttaccttaaagaagcgtactttgtagtgctcacacagattgtctgatagaaagtgaaaagcaaggcgtttacgcgttgggagtgaggctgaagagaataaggccgttcgctttctattaatgaaagctcaccctacacgaaaatatcacgcaacgcgtgataagcaattttcgtgtccccttcgtctagaggcccaggacaccgccctttcacggcggtaacaggggttcgaatcccctaggggacgccacttgctggtttgtgagtgaaagtcgccgaccttaatatctcaaaactcatcttcgggtgatgtttgagatatttgctctttaaaaatctggatcaagctgaaaattgaaacactgaacaacgagagttgttcgtgagtctctcaaattttcgcaacacgatgatgaatcgaaagaaacatcttcgggttgtgaggttaagcgactaagcgtacacggtggatgccctggcagtcagaggcgatgaaggacgtgctaatctgcgaaaagcgtcggtaaggtgatatgaaccgttacagccggcgatgtccgaatggggaaacccagtgcaattcgttgcactatcgtttgatgaatacatagtcaaacgaggcgaaccgggggaactgaaacatctaagtaccccgaggaaaagaaatcaaccgagattcccccagtagcggcgagcgaacggggagcagcccggagtctgaatcagcttgtgtgttagtggaagcgtctggaaagtcgcagggtacagggtgatactcccgtacactaaaacacacaggctgtgaactcgaagagtagggcgggacacgtggtatcctgtctgaatatggggggaccatcctccaaggctaaatactcctgactgaccgatagtgaaccagtaccgtgagggaaaggcgaaaagaaccccggcgaggggagtgaaaaagaacctgaaaccgtgtacgtacaagcagtaggagccccaccaccaaagcgtttcgctttgcgtggtgcgcaaaatgcgtaacgacagcatgatggacggttaacggagcgtcagcgacgttcaacctcaaaaatcaggcagtggagcgttttggggtggggtgactgcgtaccttttgtataatgggtcagcgacttatattctgtagcaaggttaaccgtataggggagccgcagggaaaccgagtcttaactgggcgttaagttgcagggtatagacccgaaacccggtgatctagccatgggcaggttgaaggttgggtaacactaactggaggaccgaaccgactaatgttgaaaaattagcggatgacttgtggctgggggtgaaaggccaatcaaaccgggagatagctggttctccccgaaagctatttaggtagcgcctcgtgaactcatcttcgggggtagagcactgtttcggctagggggtcatcccgacttaccaacccgatgcaaactacgaataccgaagaatgttatcacgggagacacacggcgggtgctaacgtccgtcgtgaagagggaaacaacccagaccgccagctaaggtcccaaagtcatggttaagtgggaaacgatgtgggaaggcccagacagccaggatgttggcttagaagcagccatcatttaaagaaagcgtaatagctcactggtcgagtcggcctgcgcggaagatgtaacggggctaaaccatgcaccgaagctgcggcagcgacactatgtgttgttgggtaggggagcgttctgtaagccgttgaaggtggcctgtgagggttgctggaggtatcagaagtgcgaatgctgacataagtaacgataatgcgggtgaaaaacccgcacgccggaagaccaagggttcctgtccaacgttaatcggggcagggtgagtcgacccctaaggcgaggccgaaaggcgtagtcgatgggaaacaggttaatattcctgtacttggtgttactgcgaaggggggacggagaaggctatgttggccgggcgacggttgtcccggtttaagcatgtaggcggatgttccaggtaaatccggaacgttactaacgctgaggtgtgatgacgaggcactacggtgctgaagtgacaaatgccctgcttccaggaaaagcctctaagcatcaggtaacatcaaatcgtaccccaaaccgacacaggtggtcaggtagagaataccaaggcgcttgagagaactcgggtgaaggaactaggcaaaatggtgccgtaacttcgggagaaggcacgctgatggtaagtgaagtgacttgctcacggagctgaaatcagtcgaagataccagctggctgcaactgtttattaaaaacacagcactgtgcaaacacgaaagtggacgtatacggtgtgacgcctgcccggtgccggaaggttaattgatggggttatcctcacggagaagctcttgatcgaagccccggtaaacggcggccgtaactataacggtcctaaggtagcgaaattccttgtcgggtaagttccgacctgcacgaatggcgtaatgatggccaggctgtctccacccgagactcagtgaaattgaactcgctgtgaagatgcagtgtacccgcggcaagacggaaagaccccgtgaacctttactatagcttgacactgaacactggtccttgatgtgtaggataggtgggaggctttgaagtgtggacgccagtctgcatggagccatccttgaaataccaccctttaatggctggtgttctaacgtgggcccgtgatccgggttgcggacagtgtctggtgggtagtttgactggggcggtctcctcctaaagagtaacggaggagcacgaaggtcagctaatcctggtcggacatcaggaggttagtgcaatggcataagctggcttgactgcgagcgtgacggcgcgagcaggtgcgaaagcaggtcatagtgatccggtggttctgaatggaagggccatcgctcaacggataaaaggtactccggggataacaggctgataccgcccaagagttcatatcgacggcggtgtttggcacctcgatgtcggctcatcacatcctggggctgaagtaggtcccaagggtatggctgttcgccatttaaagtggtacgcgagctgggtttagaacgtcgtgagacagttcggtccctatctgccgtgggcgctggagaattgaggggggctgctcctagtacgagaggaccggagtggacgcatcactggtgttcgggttgtcatgccaatggcattgcccggtagctaaatgcggaagagataagtgctgaaagcatctaagcacgaaacttgccccgagatgagttctccctgactccttgagagtcctgaaggaacgttgaagacgacgacgttgataggccgggtgtgtaagcgcagcgatgcgttgagctaaccggtactaatgaaccgtgaggcttaaccttacaacgccgaagctgttttggcggatgagagaagattttcagcctgatacagattaaatcagaacgcagaagcggtctgataaaacagaattgcctggcggcactagcgcggtggtcccacctgaccccatgccgaactcagaagtgaaacgccgtagcgccgatggtagtgtggggtctccccatgtgagagtagggaactgccaggcatcaaataaaacgaaaggctcagtcgaaagactgggcctttcgttttatctgttgtttgtcggtgaacgctctcctgagtaggacaaatccgccgggagcggatttgaacgttgcgaagcaacggcccggagggtggcgggcaggacgcccgccataaactgccaggcatcaaattaagcagaaggccatcctgacggatggcctttttgcgtttctacaaactcttcctgtcgtcatatctacaagccggcgcgccgggaaatgtgcgcggaacccctatttgtttatttttctaaatacattcaaatatgtatccgctcatgagacaataaccctgataaatgcttcaataatattgaaaaaggaagagtatgagtattcaacatttccgtgtcgcccttattcccttttttgcggcattttgccttcctgtttttgctcacccagaaacgctggtgaaagtaaaagatgctgaagatcagttgggtgcacgagtgggttacatcgaactggatctcaacagcggtaagatccttgagagttttcgccccgaagaacgttttccaatgatgagcacttttaaagttctgctatgtggcgcggtattatcccgtgttgacgccgggcaagagcaactcggtcgccgcatacactattctcagaatgacttggttgagtactcaccagtcacagaaaagcatcttacggatggcatgacagtaagagaattatgcagtgctgcaataaccatgagtgataacactgcggccaacttacttctgacaacgatcggaggaccgaaggagctaaccgcttttttgcacaacatgggggatcatgtaactcgccttgatcgttgggaaccggagctgaatgaagccataccaaacgacgagcgtgacaccacgatgcctgcagcaatggcaacaacgttgcgcaaactattaactggcgaactacttactctagcttcccggcaacaattaatagactggatggaggcggataaagttgcaggaccacttctgcgctcggcccttccggctagctggtttattgctgataaatctggagccggtgagcgtgggtctcgcggtatcattgcagcactggggccagatggtaagccctcccgtatcgtagttatctacacgacggggagtcaggcaactatggatgaacgaaatagacagatcgctgagataggtgcctcactgattaagcattggtaactgcagaccaagtttactcatatatactttagattgatttaaaacttcatttttaatttaaaaggatctaggtgaagatcctttttgataatctcatgaccaaaatcccttaacgtgagttttcgttccactgagcgtcagaccccgtagaaaagatcaaaggatcttcttgagatcctttttttctgcgcgtaatctgctgcttgcaaacaaaaaaaccaccgctaccagcggtggtttgtttgccggatcaagagctaccaactctttttccgaaggtaactggcttcagcagagcgcagataccaaatactgtccttctagtgtagccgtagttaggccaccacttcaagaactctgtagcaccgcctacatacctcgctctgctaatcctgttaccagtggctgctgccagtggcgataagtcgtgtcttaccgggttggactcaagacgatagttaccggataaggcgcagcggtcgggctgaacggggggttcgtgcacacagcccagcttggagcgaacgacctacaccgaactgagatacctacagcgtgagctatgagaaagcgccacgcttcccgaagggagaaaggcggacaggtatccggtaagcggcagggtcggaacaggagagcgcacgagggagcttccagggggaaacgcctggtatctttatagtcctgtcgggtttcgccacctctgacttgagcgtcgatttttgtgatgctcgtcaggggggcggagcctatggaaaaacgccagcaacgcggcctttttacggttcctggccttttgctgg

SEQ ID NO: 51 - DNA, 7501 bp, Artificial
  Synthetic
agacttagggaccctgcggccgccattaattcctaatttttgttgacactctatcattgatagagttattttaccactccctatcagtgatagagaaaagtgaaatgaatagaccggccgctgagaaaaagcgaagcggcgcactgctctttaacaatttatcagacaatctgtgtgggcactcaaagtgacatggattcttaacgtcttcggacgaaaaatgaataccaagtctcaaagagtgaacacgtaattcattacgaagtttaattctacgagcatcaaacttaaattgaagagtttgatcatggctcagattgaacgctggcggcaggcctaacacatgcaagtcgaacggtagcacagagagcttgctctcgggtgacgagtggcggacgggtgagtaatgtctgggaaactgcccgatggagggggataactactggaaacggtagctaataccgcataacgtcgcaagaccaaagagggggaccttcgggcctcttgccatcggatgtgcccagatgggattagcttgtaggtgaggtaacggctcacctaggcgacgatccctagctggtctgagaggatgaccagccacactggaactgagacacggtccagactcctacgggaggcagcagtggggaatattgcacaatgggcgcaagcctgatgcagccatgccgcgtgtatgaagaaggccttcgggttgtaaagtactttcagcggggaggaagggagtgaggttaataacctcattcattgacgttacccgcagaagaagcaccggctaactccgtgccagcagccgcggtaatacggagggtgcaagcgttaatcggaattactgggcgtaaagcgcacgcaggcggtctgtcaagtcggatgtgaaatccccgggctcaacctgggaactgcattcgaaactggcaggctggagtcttgtagaggggggtagaattccaggtgtagcggtgaaatgcgtagagatctggaggaataccggtggcgaaggcggccccctggacaaagactgacgctcaggtgcgaaagcgtggggagcaaacaggattagataccctggtagtccacgctgtaaacgatgtcgacttggaggttgttcccttgaggagtggcttccggagctaacgcgttaagtcgaccgcctggggagtacggccgcaaggttaaaactcaaatgaattgacgggggcccgcacaagcggtggagcatgtggtttaattcgatgcaacgcgaagaaccttacctactcttgacatccagagaacttagcagagatgctttggtgccttcgggaactctgagacaggtgctgcatggctgtcgtcagctcgtgttgtgaaatgttgggttaagtcccgcaacgagcgcaacccttatcctttgttgccagcgattcggtcgggaactcaaaggagactgccagtgataaactggaggaaggtggggatgacgtcaagtcatcatggcccttacgagtagggctacacacgtgctacaatggcatatacaaagagaagcgacctcgcgagagcaagcggacctcataaagtatgtcgtagtccggattggagtctgcaactcgactccatgaagtcggaatcgctagtaatcgtggatcagaatgccacggtgaatacgttcccgggccttgtacacaccgcccgtcacaccatgggagtgggttgcaaaagaagtaggtagcttaaccttcgggagggcgcttaccactttgtgattcatgactggggtgaagtcgtaacaaggtaaccgtaggggaacctgcggttggatcatgtggttaccttaaagaacctgcctttgtagtgctcacacagattgtctgatagatgtaaagaagcaagacggctgcgaagtcgcgacacctcgtgtccccttcgtctagcggttaggactccgccctttcacggcggcaacaggggttcgaatcccctaggggacgccacttgctggctgtgagtgaaaggcacaaccaaccgatatctcaaaactcatcttcgggtgacgtttgagatatttgctctttaaaaatctggatcaagctgaaaattgaaacgacacactgttcaagtgtgttcgagtctctcaaattttcgcgacacgacgatgtttcacgaaacatcttcgggttgtgaggttaagcgactaagcgtacacggtggatgccctggcagtcagaggcgatgaaggacgtgctaatctgcgaaaagcgtcggtaaggtgatatgaaccgttacagccggcgatgtccgaatggggaaacccagtgcaattcgttgcactatcgtttgatgaatacatagtcaaacgaggcgaaccgggggaactgaaacatctaagtaccccgaggaaaagaaatcaaccgagattcccccagtagcggcgagcgaacggggagcagcccggagtctgaatcagcttgtgtgttagtggaagcgtctggaaagtcgcagggtacagggtgatactcccgtacactaaaacacacaggctgtgaactcgaagagtagggcgggacacgtggtatcctgtctgaatatggggggaccatcctccaaggctaaatactcctgactgaccgatagtgaaccagtaccgtgagggaaaggcgaaaagaaccccggcgaggggagtgaaaaagaacctgaaaccgtgtacgtacaagcagtaggagccccaccaccaaagcgtttcgctttgcgtggtgcgcaaaatgcgtaacgacagcatgatggacggttaacggagcgtcagcgacgttcaacctcaaaaatcaggcagtggagcgttttggggtggggtgactgcgtaccttttgtataatgggtcagcgacttatattctgtagcaaggttaaccgtataggggagccgcagggaaaccgagtcttaactgggcgttaagttgcagggtatagacccgaaacccggtgatctagccatgggcaggttgaaggttgggtaacactaactggaggaccgaaccgactaatgttgaaaaattagcggatgacttgtggctgggggtgaaaggccaatcaaaccgggagatagctggttctccccgaaagctatttaggtagcgcctcgtgaactcatcttcgggggtagagcactgtttcggctagggggtcatcccgacttaccaacccgatgcaaactacgaataccgaagaatgttatcacgggagacacacggcgggtgctaacgtccgtcgtgaagagggaaacaacccagaccgccagctaaggtcccaaagtcatggttaagtgggaaacgatgtgggaaggcccagacagccaggatgttggcttagaagcagccatcatttaaagaaagcgtaatagctcactggtcgagtcggcctgcgcggaagatgtaacggggctaaaccatgcaccgaagctgcggcagcgacactatgtgttgttgggtaggggagcgttctgtaagccgttgaaggtggcctgtgagggttgctggaggtatcagaagtgcgaatgctgacataagtaacgataatgcgggtgaaaaacccgcacgccggaagaccaagggttcctgtccaacgttaatcggggcagggtgagtcgacccctaaggcgaggccgaaaggcgtagtcgatgggaaacaggttaatattcctgtacttggtgttactgcgaaggggggacggagaaggctatgttggccgggcgacggttgtcccggtttaagcatgtaggcggatgttccaggtaaatccggaacgttactaacgctgaggtgtgatgacgaggcactacggtgctgaagtgacaaatgccctgcttccaggaaaagcctctaagcatcaggtaacatcaaatcgtaccccaaaccgacacaggtggtcaggtagagaataccaaggcgcttgagagaactcgggtgaaggaactaggcaaaatggtgccgtaacttcgggagaaggcacgctgatggtaagtgaagtgacttgctcacggagctgaaatcagtcgaagataccagctggctgcaactgtttattaaaaacacagcactgtgcaaacacgaaagtggacgtatacggtgtgacgcctgcccggtgccggaaggttaattgatggggttatcctcacggagaagctcttgatcgaagccccggtaaacggcggccgtaactataacggtcctaaggtagcgaaattccttgtcgggtaagttccgacctgcacgaatggcgtaatgatggccaggctgtctccacccgagactcagtgaaattgaactcgctgtgaagatgcagtgtacccgcggcaagacggaaagaccccgtgaacctttactatagcttgacactgaacactggtccttgatgtgtaggataggtgggaggctttgaagtgtggacgccagtctgcatggagccatccttgaaataccaccctttaatggctggtgttctaacgtgggcccgtgatccgggttgcggacagtgtctggtgggtagtttgactggggcggtctcctcctaaagagtaacggaggagcacgaaggtcagctaatcctggtcggacatcaggaggttagtgcaatggcataagctggcttgactgcgagcgtgacggcgcgagcaggtgcgaaagcaggtcatagtgatccggtggttctgaatggaagggccatcgctcaacggataaaaggtactccggggataacaggctgataccgcccaagagttcatatcgacggcggtgtttggcacctcgatgtcggctcatcacatcctggggctgaagtaggtcccaagggtatggctgttcgccatttaaagtggtacgcgagctgggtttagaacgtcgtgagacagttcggtccctatctgccgtgggcgctggagaattgaggggggctgctcctagtacgagaggaccggagtggacgcatcactggtgttcgggttgtcatgccaatggcattgcccggtagctaaatgcggaagagataagtgctgaaagcatctaagcacgaaacttgccccgagatgagttctccctgactccttgagagtcctgaaggaacgttgaagacgacgacgttgataggccgggtgtgtaagcgcagcgatgcgttgagctaaccggtactaatgaaccgtgaggcttaaccttacaacgccgaagatgttttggcgatttgagagaagattttcagcttagattccggattttcgggaacgaaaggttttacgctgaggcaaggcggcaaatgaagaaaaggaaggagcatactgtagtatgtgactgactttacgaatgcagccaacgcagcatcggtgtaaaagattcgtttctgacaacagaatttgcctggcggcagtagcgcggtggtcccacctgaccccatgccgaactcagaagtgaaacgccgtagcgccgatggtagtgtggggtctccccatgtgagagtagggaactgccaggcatcaaacaagtgaagagcccatcctgacggatgggctttttgcgttttagtcgtctgaaactgtcggatatcgttctccctgtatccaatatccctcatgaatcctgccggatttatgctgtctccctgtataagatccagagtaattccttctccacattccagacttatgtaccaggcttataatgtctatcagccagcgcgcgccgggaaatgtgcgcggaacccctatttgtttatttttctaaatacattcaaatatgtatccgctcatgagacaataaccctgataaatgcttcaataatattgaaaaaggaagagtatgagtattcaacatttccgtgtcgcccttattcccttttttgcggcattttgccttcctgtttttgctcacccagaaacgctggtgaaagtaaaagatgctgaagatcagttgggtgcacgagtgggttacatcgaactggatctcaacagcggtaagatccttgagagttttcgccccgaagaacgttttccaatgatgagcacttttaaagttctgctatgtggcgcggtattatcccgtgttgacgccgggcaagagcaactcggtcgccgcatacactattctcagaatgacttggttgagtactcaccagtcacagaaaagcatcttacggatggcatgacagtaagagaattatgcagtgctgcaataaccatgagtgataacactgcggccaacttacttctgacaacgatcggaggaccgaaggagctaaccgcttttttgcacaacatgggggatcatgtaactcgccttgatcgttgggaaccggagctgaatgaagccataccaaacgacgagcgtgacaccacgatgcctgcagcaatggcaacaacgttgcgcaaactattaactggcgaactacttactctagcttcccggcaacaattaatagactggatggaggcggataaagttgcaggaccacttctgcgctcggcccttccggctagctggtttattgctgataaatctggagccggtgagcgtgggtctcgcggtatcattgcagcactggggccagatggtaagccctcccgtatcgtagttatctacacgacggggagtcaggcaactatggatgaacgaaatagacagatcgctgagataggtgcctcactgattaagcattggtaactgcagaccaagtttactcatatatactttagattgatttaaaacttcatttttaatttaaaaggatctaggtgaagatcctttttgataatctcatgaccaaaatcccttaacgtgagttttcgttccactgagcgtcagaccccgtagaaaagatcaaaggatcttcttgagatcctttttttctgcgcgtaatctgctgcttgcaaacaaaaaaaccaccgctaccagcggtggtttgtttgccggatcaagagctaccaactctttttccgaaggtaactggcttcagcagagcgcagataccaaatactgtccttctagtgtagccgtagttaggccaccacttcaagaactctgtagcaccgcctacatacctcgctctgctaatcctgttaccagtggctgctgccagtggcgataagtcgtgtcttaccgggttggactcaagacgatagttaccggataaggcgcagcggtcgggctgaacggggggttcgtgcacacagcccagcttggagcgaacgacctacaccgaactgagatacctacagcgtgagctatgagaaagcgccacgcttcccgaagggagaaaggcggacaggtatccggtaagcggcagggtcggaacaggagagcgcacgagggagcttccagggggaaacgcctggtatctttatagtcctgtcgggtttcgccacctctgacttgagcgtcgatttttgtgatgctcgtcaggggggcggagcctatggaaaaacgccagcaacgcggcctttttacggttcctggccttttgctgg

SEQ ID NO: 52 - DNA, 7531 bp, Artificial
  Synthetic
agacttagggaccctgcggccgccattaattcctaatttttgttgacactctatcattgatagagttattttaccactccctatcagtgatagagaaaagtgaaatgaatagaccggccgctgagaaaaagcgaagcggcactgctctttaacaatttatcagacaatctgtgtgggcactcgaagatacggattcttaacgtcgcaagacgaaaaatgaataccaagtctcaagagtgaacacgtaattcattacgaagtttaattctttgagcgtcaaacttttaaattgaagagtttgatcatggctcagattgaacgctggcggcaggcctaacacatgcaagtcgaacggtagcacagagagcttgctctcgggtgacgagtggcggacgggtgagtaatgtctgggaaactgcccgatggagggggataactactggaaacggtagctaataccgcataacgtcgcaagaccaaagagggggaccttcgggcctcttgccatcggatgtgcccagatgggattagcttgtaggtgaggtaacggctcacctaggcgacgatccctagctggtctgagaggatgaccagccacactggaactgagacacggtccagactcctacgggaggcagcagtggggaatattgcacaatgggcgcaagcctgatgcagccatgccgcgtgtatgaagaaggccttcgggttgtaaagtactttcagcggggaggaagggagtgaggttaataacctcattcattgacgttacccgcagaagaagcaccggctaactccgtgccagcagccgcggtaatacggagggtgcaagcgttaatcggaattactgggcgtaaagcgcacgcaggcggtctgtcaagtcggatgtgaaatccccgggctcaacctgggaactgcattcgaaactggcaggctggagtcttgtagaggggggtagaattccaggtgtagcggtgaaatgcgtagagatctggaggaataccggtggcgaaggcggccccctggacaaagactgacgctcaggtgcgaaagcgtggggagcaaacaggattagataccctggtagtccacgctgtaaacgatgtcgacttggaggttgttcccttgaggagtggcttccggagctaacgcgttaagtcgaccgcctggggagtacggccgcaaggttaaaactcaaatgaattgacgggggcccgcacaagcggtggagcatgtggtttaattcgatgcaacgcgaagaaccttacctactcttgacatccagagaacttagcagagatgctttggtgccttcgggaactctgagacaggtgctgcatggctgtcgtcagctcgtgttgtgaaatgttgggttaagtcccgcaacgagcgcaacccttatcctttgttgccagcgattcggtcgggaactcaaaggagactgccagtgataaactggaggaaggtggggatgacgtcaagtcatcatggcccttacgagtagggctacacacgtgctacaatggcatatacaaagagaagcgacctcgcgagagcaagcggacctcataaagtatgtcgtagtccggattggagtctgcaactcgactccatgaagtcggaatcgctagtaatcgtggatcagaatgccacggtgaatacgttcccgggccttgtacacaccgcccgtcacaccatgggagtgggttgcaaaagaagtaggtagcttaaccttcgggagggcgcttaccactttgtgattcatgactggggtgaagtcgtaacaaggtaaccgtaggggaacctgcggttggatcatgtggttaccttaaagaagcgtactttgtagtgctcacacagattgtctgatagaaagtgaaaagcaaggcgtttacgcgttgggagtgaggctgaagagaataaggccgttcgctttctattaatgaaagctcaccctacacgaaaatatcacgcaacgcgtgataagcaattttcgtgtccccttcgtctagaggcccaggacaccgccctttcacggcggtaacaggggttcgaatcccctaggggacgccacttgctggtttgtgagtgaaagtcgccgaccttaatatctcaaaactcatcttcgggtgatgtttgagatatttgctctttaaaaatctggatcaagctgaaaattgaaacactgaacaacgagagttgttcgtgagtctctcaaattttcgcaacacgatgatgaatcgaaagaaacatcttcgggttgtgaggttaagcgactaagcgtacacggtggatgccctggcagtcagaggcgatgaaggacgtgctaatctgcgaaaagcgtcggtaaggtgatatgaaccgttacagccggcgatgtccgaatggggaaacccagtgcaattcgttgcactatcgtttgatgaatacatagtcaaacgaggcgaaccgggggaactgaaacatctaagtaccccgaggaaaagaaatcaaccgagattcccccagtagcggcgagcgaacggggagcagcccggagtctgaatcagcttgtgtgttagtggaagcgtctggaaagtcgcagggtacagggtgatactcccgtacactaaaacacacaggctgtgaactcgaagagtagggcgggacacgtggtatcctgtctgaatatggggggaccatcctccaaggctaaatactcctgactgaccgatagtgaaccagtaccgtgagggaaaggcgaaaagaaccccggcgaggggagtgaaaaagaacctgaaaccgtgtacgtacaagcagtaggagccccaccaccaaagcgtttcgctttgcgtggtgcgcaaaatgcgtaacgacagcatgatggacggttaacggagcgtcagcgacgttcaacctcaaaaatcaggcagtggagcgttttggggtggggtgactgcgtaccttttgtataatgggtcagcgacttatattctgtagcaaggttaaccgtataggggagccgcagggaaaccgagtcttaactgggcgttaagttgcagggtatagacccgaaacccggtgatctagccatgggcaggttgaaggttgggtaacactaactggaggaccgaaccgactaatgttgaaaaattagcggatgacttgtggctgggggtgaaaggccaatcaaaccgggagatagctggttctccccgaaagctatttaggtagcgcctcgtgaactcatcttcgggggtagagcactgtttcggctagggggtcatcccgacttaccaacccgatgcaaactacgaataccgaagaatgttatcacgggagacacacggcgggtgctaacgtccgtcgtgaagagggaaacaacccagaccgccagctaaggtcccaaagtcatggttaagtgggaaacgatgtgggaaggcccagacagccaggatgttggcttagaagcagccatcatttaaagaaagcgtaatagctcactggtcgagtcggcctgcgcggaagatgtaacggggctaaaccatgcaccgaagctgcggcagcgacactatgtgttgttgggtaggggagcgttctgtaagccgttgaaggtggcctgtgagggttgctggaggtatcagaagtgcgaatgctgacataagtaacgataatgcgggtgaaaaacccgcacgccggaagaccaagggttcctgtccaacgttaatcggggcagggtgagtcgacccctaaggcgaggccgaaaggcgtagtcgatgggaaacaggttaatattcctgtacttggtgttactgcgaaggggggacggagaaggctatgttggccgggcgacggttgtcccggtttaagcatgtaggcggatgttccaggtaaatccggaacgttactaacgctgaggtgtgatgacgaggcactacggtgctgaagtgacaaatgccctgcttccaggaaaagcctctaagcatcaggtaacatcaaatcgtaccccaaaccgacacaggtggtcaggtagagaataccaaggcgcttgagagaactcgggtgaaggaactaggcaaaatggtgccgtaacttcgggagaaggcacgctgatggtaagtgaagtgacttgctcacggagctgaaatcagtcgaagataccagctggctgcaactgtttattaaaaacacagcactgtgcaaacacgaaagtggacgtatacggtgtgacgcctgcccggtgccggaaggttaattgatggggttatcctcacggagaagctcttgatcgaagccccggtaaacggcggccgtaactataacggtcctaaggtagcgaaattccttgtcgggtaagttccgacctgcacgaatggcgtaatgatggccaggctgtctccacccgagactcagtgaaattgaactcgctgtgaagatgcagtgtacccgcggcaagacggaaagaccccgtgaacctttactatagcttgacactgaacactggtccttgatgtgtaggataggtgggaggctttgaagtgtggacgccagtctgcatggagccatccttgaaataccaccctttaatggctggtgttctaacgtgggcccgtgatccgggttgcggacagtgtctggtgggtagtttgactggggcggtctcctcctaaagagtaacggaggagcacgaaggtcagctaatcctggtcggacatcaggaggttagtgcaatggcataagctggcttgactgcgagcgtgacggcgcgagcaggtgcgaaagcaggtcatagtgatccggtggttctgaatggaagggccatcgctcaacggataaaaggtactccggggataacaggctgataccgcccaagagttcatatcgacggcggtgtttggcacctcgatgtcggctcatcacatcctggggctgaagtaggtcccaagggtatggctgttcgccatttaaagtggtacgcgagctgggtttagaacgtcgtgagacagttcggtccctatctgccgtgggcgctggagaattgaggggggctgctcctagtacgagaggaccggagtggacgcatcactggtgttcgggttgtcatgccaatggcattgcccggtagctaaatgcggaagagataagtgctgaaagcatctaagcacgaaacttgccccgagatgagttctccctgactccttgagagtcctgaaggaacgttgaagacgacgacgttgataggccgggtgtgtaagcgcagcgatgcgttgagctaaccggtactaatgaaccgtgaggcttaaccttacaacgccgaagctgttttggcggatgagagaagattttcagcctgatacagattaaatcagaacgcagaagcggtctgataaaacagaattgcctggcggcactagcgcggtggtcccacctgaccccatgccgaactcagaagtgaaacgccgtagcgccgatggtagtgtggggtctccccatgtgagagtagggaactgccaggcatcaaataaaacgaaaggctcagtcgaaagactgggcctttcgttttatctgttgtttgtcggtgaacgctctcctgagtaggacaaatccgccgggagcggatttgaacgttgcgaagcaacggcccggagggtggcgggcaggacgcccgccataaactgccaggcatcaaattaagcagaaggccatcctgacggatggcctttttgcgtttctacaaactcttcctgtcgtcatatctacaagccggcgcgccgggaaatgtgcgcggaacccctatttgtttatttttctaaatacattcaaatatgtatccgctcatgagacaataaccctgataaatgcttcaataatattgaaaaaggaagagtatgagtattcaacatttccgtgtcgcccttattcccttttttgcggcattttgccttcctgtttttgctcacccagaaacgctggtgaaagtaaaagatgctgaagatcagttgggtgcacgagtgggttacatcgaactggatctcaacagcggtaagatccttgagagttttcgccccgaagaacgttttccaatgatgagcacttttaaagttctgctatgtggcgcggtattatcccgtgttgacgccgggcaagagcaactcggtcgccgcatacactattctcagaatgacttggttgagtactcaccagtcacagaaaagcatcttacggatggcatgacagtaagagaattatgcagtgctgcaataaccatgagtgataacactgcggccaacttacttctgacaacgatcggaggaccgaaggagctaaccgcttttttgcacaacatgggggatcatgtaactcgccttgatcgttgggaaccggagctgaatgaagccataccaaacgacgagcgtgacaccacgatgcctgcagcaatggcaacaacgttgcgcaaactattaactggcgaactacttactctagcttcccggcaacaattaatagactggatggaggcggataaagttgcaggaccacttctgcgctcggcccttccggctagctggtttattgctgataaatctggagccggtgagcgtgggtctcgcggtatcattgcagcactggggccagatggtaagccctcccgtatcgtagttatctacacgacggggagtcaggcaactatggatgaacgaaatagacagatcgctgagataggtgcctcactgattaagcattggtaactgcagaccaagtttactcatatatactttagattgatttaaaacttcatttttaatttaaaaggatctaggtgaagatcctttttgataatctcatgaccaaaatcccttaacgtgagttttcgttccactgagcgtcagaccccgtagaaaagatcaaaggatcttcttgagatcctttttttctgcgcgtaatctgctgcttgcaaacaaaaaaaccaccgctaccagcggtggtttgtttgccggatcaagagctaccaactctttttccgaaggtaactggcttcagcagagcgcagataccaaatactgtccttctagtgtagccgtagttaggccaccacttcaagaactctgtagcaccgcctacatacctcgctctgctaatcctgttaccagtggctgctgccagtggcgataagtcgtgtcttaccgggttggactcaagacgatagttaccggataaggcgcagcggtcgggctgaacggggggttcgtgcacacagcccagcttggagcgaacgacctacaccgaactgagatacctacagcgtgagctatgagaaagcgccacgcttcccgaagggagaaaggcggacaggtatccggtaagcggcagggtcggaacaggagagcgcacgagggagcttccagggggaaacgcctggtatctttatagtcctgtcgggtttcgccacctctgacttgagcgtcgatttttgtgatgctcgtcaggggggcggagcctatggaaaaacgccagcaacgcggcctttttacggttcctggccttttgctgg

SEQ ID NO: 53 - DNA, 7148 bp, Artificial
  Synthetic
agacttagggaccctgcggccgccattaattcctaatttttgttgacactctatcattgatagagttattttaccactccctatcagtgatagagaaaagtgaaatgaatagaccggccgctgagaaaaagcgaagcggctttaacaatttatcagacaatctgtgtgggcactcaaagtgacatggattcttaatgtcctcggacactaaatgaataccaagtctcaacgagtgaacacgtaattcattacgaagtttaattcattgagcatcaaacttttaaattgaagagtttgatcatggctcagattgaacgctggcggcaggcctaacacatgcaagtcgaacggtaacaggaagcagcttgctgcttcgctgacgagtggcggacgggtgagtaatgtctgggaaactgcctgatggagggggataactactggaaacggtagctaataccgcataacgtcgcaagaccaaagagggggaccttcgggcctcttgccatcggatgtgcccagatgggattagctagtaggtggggtaacggctcacctaggcgacgatccctagctggtctgagaggatgaccagccacactggaactgagacacggtccagactcctacgggaggcagcagtggggaatattgcacaatgggcgcaagcctgatgcagccatgccgcgtgtatgaagaaggccttcgggttgtaaagtactttcagcggggaggaaggcgataaggttaataaccttgtcgattgacgttacccgcagaagaagcaccggctaactccgtgccagcagccgcggtaatacggagggtgcaagcgttaatcggaattactgggcgtaaagcgcacgcaggcggtctgtcaagtcggatgtgaaatccccgggctcaacctgggaactgcattcgaaactggcaggctagagtcttgtagaggggggtagaattccaggtgtagcggtgaaatgcgtagagatctggaggaataccggtggcgaaggcggccccctggacaaagactgacgctcaggtgcgaaagcgtggggagcaaacaggattagataccctggtagtccacgccgtaaacgatgtcgacttggaggttgtgcccttgaggcgtggcttccggagctaacgcgttaagtcgaccgcctggggagtacggccgcaaggttaaaactcaaatgaattgacgggggcccgcacaagcggtggagcatgtggtttaattcgatgcaacgcgaagaaccttacctactcttgacatccagagaacttagcagagatgctttggtgccttcgggaactctgagacaggtgctgcatggctgtcgtcagctcgtgttgtgaaatgttgggttaagtcccgcaacgagcgcaacccttatcctttgttgccagcggtccggccgggaactcaaaggagactgccagtgataaactggaggaaggtggggatgacgtcaagtcatcatggcccttacgagtagggctacacacgtgctacaatggcgcatacaaagagaagcgacctcgcgagagcaagcggacctcataaagtgcgtcgtagtccggattggagtctgcaactcgactccatgaagtcggaatcgctagtaatcgtggatcagaatgccacggtgaatacgttcccgggccttgtacacaccgcccgtcacaccatgggagtgggttgcaaaagaagtaggtagcttaaccttcgggagggcgcttaccactttgtgattcatgactggggtgaagtcgtaacaaggtaaccgtaggggaacctgcggttggatcacctccttaccttaaagaacctgcctttgcagtgctcacacagattgtctgatgaatgatgaacttctgaatgtacttttgagtgcattaagaagttttgctctttaaaaatctggatcaagctgaaaattgaaacgacacacagctcatgtgtgttcgagtctctcaaattttcgcaatcagaagtgaaacatcttcgggttgtgaggttaagcgactaagcgtacacggtggatgccctggcagtcagaggcgatgaaggacgtgctaatctgcgaaaagcgccggcgaggtgatatgaacctttgacccggcgatgtccgaatggggaaacccagtgcaatccgttgcactatcgttaactgaatacataggttaacgaggcgaaccgggggaactgaaacatctaagtaccccgaggaaaagaaatcaaccgagattcccccagtagcggcgagcgaacggggagcagcccggagtctgaatcagcttgtgtgttagtggaacggtctggaaagtccgacggtacagggtgatagtcccgtacacgaaagcacacttgctgtgaactcgaagagtagggcgggacacgtggtatcctgtctgaatatggggggaccatcctccaaggctaaatactcctgactgaccgatagtgaaccagtaccgtgagggaaaggcgaaaagaaccccggcgaggggagtgaaaaagaacctgaaaccgtgtacgtacaagcagtgggagcctctttatggggtgactgcgtaccttttgtataatgggtcagcgacttatattctgtagcaaggttaaccgtataggggagccgaagggaaaccgagtcttaactgggcgttaagttgcagggtatagacccgaaacccggtgatctagccatgggcaggttgaaggttgggtaacactaactggaggaccgaaccgactaatgttgaaaaattagcggatgacctgtggctgggggtgaaaggccaatcaaaccgggagatagctggttctccccgaaagctatttaggtagcgcctcgtgaactcatcttcgggggtagagcactgtttcggctagggggccatcccggcttaccaacccgatgcaaactacgaataccgaagaatgttatcacgggagacacacggcgggtgctaacgtccgtcgtgaagagggaaacaacccagaccgccagctaaggtcccaaagtcatggttaagtgggaaacgatgtgggaaggcacagacagccaggatgttggcttagaagcagccatcatttaaagaaagcgtaatagctcactggtcgagtcggcctgcgcggaagatgtaacggggctaaaccatgcaccgaagctgcggcagcgacactatgtgttgttgggtaggggagcgttctgtaagccgttgaaggtgtgctgtgaggcatgctggaggtatcagaagtgcgaatgctgacataagtaacgataaagcgggtgaaaagcccgctcgccggaagaccaagggttcctgtccaacgttaatcggggcagggtgagtcgacccctaaggcgaggccgaaaggcgtagtcgatgggaaacaggttaatattcctgtacttggtgttactgcgaaggggggacggagaaggctatgtcagccgggcgacggttgtcccggtttaagcatgtaggcggaggttccaggtaaatccggtaccttttaacgctgaggtgtgatgacgaggcactacggtgctgaagtgataaatgccctgcttccaggaaaagcctctaagcatcaggtaacacgaaatcgtaccccaaaccgacacaggtggtcaggtagagaataccaaggcgcttgagagaactcgggtgaaggaactaggcaaaatggtgccgtaacttcgggagaaggcacgctgatgtgtaggtgaagcccctgcgggtggagctgaaatcagtcgaagataccagctggctgcaactgtttattaaaaacacagcactgtgcaaacacgaaagtggacgtatacggtgtgacgcctgcccggtgccggaaggttaattgatggggttagcggcaacgcgaagctcttgatcgaagccccggtaaacggcggccgtaactataacggtcctaaggtagcgaaattccttgtcgggtaagttccgacctgcacgaatggcgtaatgatggccaggctgtctccacccgagactcagtgaaattgaactcgctgtgaagatgcagtgtacccgcggcaagacggaaagaccccgtgaacctttactatagcttgacactgaacactggtccttgatgtgtaggataggtgggaggctttgaagcgtggacgccagtctgcgtggagccaaccttgaaataccaccctttaatggctggtgttctaacgtagacccgtaatccgggttgcggacagtgtctggtgggtagtttgactggggcggtctcctcccaaagagtaacggaggagcacgaaggttggctaatcctggtcggacatcaggaggttagtgcaatggcataagccagcttgactgcgagcgtgacggcgcgagcaggtgcgaaagcaggtcatagtgatccggtggttctgaatggaagggccatcgctcaacggataaaaggtactccggggataacaggctgataccgcccaagagttcatatcgacggcggtgtttggcacctcgatgtcggctcatcacatcctggggctgaagtaggtcccaagggtatggctgttcgccatttaaagtggtacgcgagctgggtttagaacgtcgtgagacagttcggtccctatctgccgtgggcgctggagaattgaggggggctgctcctagtacgagaggaccggagtggacgcatcactggtgttcgggttgtcatgccaatggcactgcccggtagctaaatgcggaagagataagtgctgaaagcatctaagcacgaaacttgccccgagatgagttctccctgagaccttgagtctcctgaaggaacgttgaagacgacgacgttgataggtcgggtgtgtaagcgcagcgatgcgttgagctaaccgatactaatgaaccgtgaggcttaaccttacaacgccgaaggtgttttggcgaagagacagacaatcaaatttcagctttgatacagattaacagaatttgcctggcggctttagcgcggtggtcccacctgaccccatgccgaactcagaagtgaaacgccgtagcgccgatggtagtgtggggtctccccatgtgagagtagggaactgccaggcatcaatcaagaagaaccccgtaccgtaaggtgcggggttttttgctttgtacgttctgaaaagtcgggtggtggcccagctttacccgccctacatgctctccctccttgaaactttctcacctttcgcttgcagactcgacattaaccccgtttctgggtatcgttagctgtctggatgtctaaacgtttatacgtatgctgtgaggatttaaggttatgccgattcgggtgcaggacgagctaccagcgcgccgggaaatgtgcgcggaacccctatttgtttatttttctaaatacattcaaatatgtatccgctcatgagacaataaccctgataaatgcttcaataatattgaaaaaggaagagtatgagtattcaacatttccgtgtcgcccttattcccttttttgcggcattttgccttcctgtttttgctcacccagaaacgctggtgaaagtaaaagatgctgaagatcagttgggtgcacgagtgggttacatcgaactggatctcaacagcggtaagatccttgagagttttcgccccgaagaacgttttccaatgatgagcacttttaaagttctgctatgtggcgcggtattatcccgtgttgacgccgggcaagagcaactcggtcgccgcatacactattctcagaatgacttggttgagtactcaccagtcacagaaaagcatcttacggatggcatgacagtaagagaattatgcagtgctgcaataaccatgagtgataacactgcggccaacttacttctgacaacgatcggaggaccgaaggagctaaccgcttttttgcacaacatgggggatcatgtaactcgccttgatcgttgggaaccggagctgaatgaagccataccaaacgacgagcgtgacaccacgatgcctgcagcaatggcaacaacgttgcgcaaactattaactggcgaactacttactctagcttcccggcaacaattaatagactggatggaggcggataaagttgcaggaccacttctgcgctcggcccttccggctagctggtttattgctgataaatctggagccggtgagcgtgggtctcgcggtatcattgcagcactggggccagatggtaagccctcccgtatcgtagttatctacacgacggggagtcaggcaactatggatgaacgaaatagacagatcgctgagataggtgcctcactgattaagcattggtaactgcagaccaagtttactcatatatactttagattgatttaaaacttcatttttaatttaaaaggatctaggtgaagatcctttttgataatctcatgaccaaaatcccttaacgtgagttttcgttccactgagcgtcagaccccgtagaaaagatcaaaggatcttcttgagatcctttttttctgcgcgtaatctgctgcttgcaaacaaaaaaaccaccgctaccagcggtggtttgtttgccggatcaagagctaccaactctttttccgaaggtaactggcttcagcagagcgcagataccaaatactgtccttctagtgtagccgtagttaggccaccacttcaagaactctgtagcaccgcctacatacctcgctctgctaatcctgttaccagtggctgctgccagtggcgataagtcgtgtcttaccgggttggactcaagacgatagttaccggataaggcgcagcggtcgggctgaacggggggttcgtgcacacagcccagcttggagcgaacgacctacaccgaactgagatacctacagcgtgagctatgagaaagcgccacgcttcccgaagggagaaaggcggacaggtatccggtaagcggcagggtcggaacaggagagcgcacgagggagcttccagggggaaacgcctggtatctttatagtcctgtcgggtttcgccacctctgacttgagcgtcgatttttgtgatgctcgtcaggggggcggagcctatggaaaaacgccagcaacgcggcctttttacggttcctggccttttgctgg

SEQ ID NO: 54 - DNA, 7418 bp, Artificial
  Synthetic
agacttagggaccctgcggccgccattaattcctaatttttgttgacactctatcattgatagagttattttaccactccctatcagtgatagagaaaagtgaaatgaatagaccggccgctgagaaaaagcgaagcggcactgctctttaacaatttatcagacaatctgtgtgggcactcgaagatacggattcttaacgtcgcaagacgaaaaatgaataccaagtctcaagagtgaacacgtaattcattacgaagtttaattctttgagcgtcaaacttttaaattgaagagtttgatcatggctcagattgaacgctggcggcaggcctaacacatgcaagtcgaacggtaacaggaagcagcttgctgcttcgctgacgagtggcggacgggtgagtaatgtctgggaaactgcctgatggagggggataactactggaaacggtagctaataccgcataacgtcgcaagaccaaagagggggaccttcgggcctcttgccatcggatgtgcccagatgggattagctagtaggtggggtaacggctcacctaggcgacgatccctagctggtctgagaggatgaccagccacactggaactgagacacggtccagactcctacgggaggcagcagtggggaatattgcacaatgggcgcaagcctgatgcagccatgccgcgtgtatgaagaaggccttcgggttgtaaagtactttcagcggggaggaaggcgataaggttaataaccttgtcgattgacgttacccgcagaagaagcaccggctaactccgtgccagcagccgcggtaatacggagggtgcaagcgttaatcggaattactgggcgtaaagcgcacgcaggcggtctgtcaagtcggatgtgaaatccccgggctcaacctgggaactgcattcgaaactggcaggctagagtcttgtagaggggggtagaattccaggtgtagcggtgaaatgcgtagagatctggaggaataccggtggcgaaggcggccccctggacaaagactgacgctcaggtgcgaaagcgtggggagcaaacaggattagataccctggtagtccacgccgtaaacgatgtcgacttggaggttgtgcccttgaggcgtggcttccggagctaacgcgttaagtcgaccgcctggggagtacggccgcaaggttaaaactcaaatgaattgacgggggcccgcacaagcggtggagcatgtggtttaattcgatgcaacgcgaagaaccttacctactcttgacatccagagaacttagcagagatgctttggtgccttcgggaactctgagacaggtgctgcatggctgtcgtcagctcgtgttgtgaaatgttgggttaagtcccgcaacgagcgcaacccttatcctttgttgccagcggtccggccgggaactcaaaggagactgccagtgataaactggaggaaggtggggatgacgtcaagtcatcatggcccttacgagtagggctacacacgtgctacaatggcgcatacaaagagaagcgacctcgcgagagcaagcggacctcataaagtgcgtcgtagtccggattggagtctgcaactcgactccatgaagtcggaatcgctagtaatcgtggatcagaatgccacggtgaatacgttcccgggccttgtacacaccgcccgtcacaccatgggagtgggttgcaaaagaagtaggtagcttaaccttcgggagggcgcttaccactttgtgattcatgactggggtgaagtcgtaacaaggtaaccgtaggggaacctgcggttggatcacctccttaccttaaagaagcgtactttgtagtgctcacacagattgtctgatagaaagtgaaaagcaaggcgtttacgcgttgggagtgaggctgaagagaataaggccgttcgctttctattaatgaaagctcaccctacacgaaaatatcacgcaacgcgtgataagcaattttcgtgtccccttcgtctagaggcccaggacaccgccctttcacggcggtaacaggggttcgaatcccctaggggacgccacttgctggtttgtgagtgaaagtcgccgaccttaatatctcaaaactcatcttcgggtgatgtttgagatatttgctctttaaaaatctggatcaagctgaaaattgaaacactgaacaacgagagttgttcgtgagtctctcaaattttcgcaacacgatgatgaatcgaaagaaacatcttcgggttgtgaggttaagcgactaagcgtacacggtggatgccctggcagtcagaggcgatgaaggacgtgctaatctgcgaaaagcgccggcgaggtgatatgaacctttgacccggcgatgtccgaatggggaaacccagtgcaatccgttgcactatcgttaactgaatacataggttaacgaggcgaaccgggggaactgaaacatctaagtaccccgaggaaaagaaatcaaccgagattcccccagtagcggcgagcgaacggggagcagcccggagtctgaatcagcttgtgtgttagtggaacggtctggaaagtccgacggtacagggtgatagtcccgtacacgaaagcacacttgctgtgaactcgaagagtagggcgggacacgtggtatcctgtctgaatatggggggaccatcctccaaggctaaatactcctgactgaccgatagtgaaccagtaccgtgagggaaaggcgaaaagaaccccggcgaggggagtgaaaaagaacctgaaaccgtgtacgtacaagcagtgggagcctctttatggggtgactgcgtaccttttgtataatgggtcagcgacttatattctgtagcaaggttaaccgtataggggagccgaagggaaaccgagtcttaactgggcgttaagttgcagggtatagacccgaaacccggtgatctagccatgggcaggttgaaggttgggtaacactaactggaggaccgaaccgactaatgttgaaaaattagcggatgacctgtggctgggggtgaaaggccaatcaaaccgggagatagctggttctccccgaaagctatttaggtagcgcctcgtgaactcatcttcgggggtagagcactgtttcggctagggggccatcccggcttaccaacccgatgcaaactacgaataccgaagaatgttatcacgggagacacacggcgggtgctaacgtccgtcgtgaagagggaaacaacccagaccgccagctaaggtcccaaagtcatggttaagtgggaaacgatgtgggaaggcacagacagccaggatgttggcttagaagcagccatcatttaaagaaagcgtaatagctcactggtcgagtcggcctgcgcggaagatgtaacggggctaaaccatgcaccgaagctgcggcagcgacactatgtgttgttgggtaggggagcgttctgtaagccgttgaaggtgtgctgtgaggcatgctggaggtatcagaagtgcgaatgctgacataagtaacgataaagcgggtgaaaagcccgctcgccggaagaccaagggttcctgtccaacgttaatcggggcagggtgagtcgacccctaaggcgaggccgaaaggcgtagtcgatgggaaacaggttaatattcctgtacttggtgttactgcgaaggggggacggagaaggctatgtcagccgggcgacggttgtcccggtttaagcatgtaggcggaggttccaggtaaatccggtaccttttaacgctgaggtgtgatgacgaggcactacggtgctgaagtgataaatgccctgcttccaggaaaagcctctaagcatcaggtaacacgaaatcgtaccccaaaccgacacaggtggtcaggtagagaataccaaggcgcttgagagaactcgggtgaaggaactaggcaaaatggtgccgtaacttcgggagaaggcacgctgatgtgtaggtgaagcccctgcgggtggagctgaaatcagtcgaagataccagctggctgcaactgtttattaaaaacacagcactgtgcaaacacgaaagtggacgtatacggtgtgacgcctgcccggtgccggaaggttaattgatggggttagcggcaacgcgaagctcttgatcgaagccccggtaaacggcggccgtaactataacggtcctaaggtagcgaaattccttgtcgggtaagttccgacctgcacgaatggcgtaatgatggccaggctgtctccacccgagactcagtgaaattgaactcgctgtgaagatgcagtgtacccgcggcaagacggaaagaccccgtgaacctttactatagcttgacactgaacactggtccttgatgtgtaggataggtgggaggctttgaagcgtggacgccagtctgcgtggagccaaccttgaaataccaccctttaatggctggtgttctaacgtagacccgtaatccgggttgcggacagtgtctggtgggtagtttgactggggcggtctcctcccaaagagtaacggaggagcacgaaggttggctaatcctggtcggacatcaggaggttagtgcaatggcataagccagcttgactgcgagcgtgacggcgcgagcaggtgcgaaagcaggtcatagtgatccggtggttctgaatggaagggccatcgctcaacggataaaaggtactccggggataacaggctgataccgcccaagagttcatatcgacggcggtgtttggcacctcgatgtcggctcatcacatcctggggctgaagtaggtcccaagggtatggctgttcgccatttaaagtggtacgcgagctgggtttagaacgtcgtgagacagttcggtccctatctgccgtgggcgctggagaattgaggggggctgctcctagtacgagaggaccggagtggacgcatcactggtgttcgggttgtcatgccaatggcactgcccggtagctaaatgcggaagagataagtgctgaaagcatctaagcacgaaacttgccccgagatgagttctccctgagaccttgagtctcctgaaggaacgttgaagacgacgacgttgataggtcgggtgtgtaagcgcagcgatgcgttgagctaaccgatactaatgaaccgtgaggcttaaccttacaacgccgaagctgttttggcggatgagagaagattttcagcctgatacagattaaatcagaacgcagaagcggtctgataaaacagaatttgcctggcggctttagcgcggtggtcccacctgaccccatgccgaactcagaagtgaaacgccgtagcgccgatggtagtgtggggtctccccatgtgagagtagggaactgccaggcatcaaataaaacgaaaggctcagtcgaaagactgggcctttcgttttatctgttgtttgtcggtgaacgctctcctgagtaggacaaatccgccgggagcggatttgaacgttgcgaagcaacggcccggagggtggcgggcaggacgcccgccataaactgccaggcatcaaattaagcagaaggccatcctgacggatggcctttttgcgtttctacaaactcttcctgtcgtcatatctacaagccggcgcgccgggaaatgtgcgcggaacccctatttgtttatttttctaaatacattcaaatatgtatccgctcatgagacaataaccctgataaatgcttcaataatattgaaaaaggaagagtatgagtattcaacatttccgtgtcgcccttattcccttttttgcggcattttgccttcctgtttttgctcacccagaaacgctggtgaaagtaaaagatgctgaagatcagttgggtgcacgagtgggttacatcgaactggatctcaacagcggtaagatccttgagagttttcgccccgaagaacgttttccaatgatgagcacttttaaagttctgctatgtggcgcggtattatcccgtgttgacgccgggcaagagcaactcggtcgccgcatacactattctcagaatgacttggttgagtactcaccagtcacagaaaagcatcttacggatggcatgacagtaagagaattatgcagtgctgcaataaccatgagtgataacactgcggccaacttacttctgacaacgatcggaggaccgaaggagctaaccgcttttttgcacaacatgggggatcatgtaactcgccttgatcgttgggaaccggagctgaatgaagccataccaaacgacgagcgtgacaccacgatgcctgcagcaatggcaacaacgttgcgcaaactattaactggcgaactacttactctagcttcccggcaacaattaatagactggatggaggcggataaagttgcaggaccacttctgcgctcggcccttccggctagctggtttattgctgataaatctggagccggtgagcgtgggtctcgcggtatcattgcagcactggggccagatggtaagccctcccgtatcgtagttatctacacgacggggagtcaggcaactatggatgaacgaaatagacagatcgctgagataggtgcctcactgattaagcattggtaactgcagaccaagtttactcatatatactttagattgatttaaaacttcatttttaatttaaaaggatctaggtgaagatcctttttgataatctcatgaccaaaatcccttaacgtgagttttcgttccactgagcgtcagaccccgtagaaaagatcaaaggatcttcttgagatcctttttttctgcgcgtaatctgctgcttgcaaacaaaaaaaccaccgctaccagcggtggtttgtttgccggatcaagagctaccaactctttttccgaaggtaactggcttcagcagagcgcagataccaaatactgtccttctagtgtagccgtagttaggccaccacttcaagaactctgtagcaccgcctacatacctcgctctgctaatcctgttaccagtggctgctgccagtggcgataagtcgtgtcttaccgggttggactcaagacgatagttaccggataaggcgcagcggtcgggctgaacggggggttcgtgcacacagcccagcttggagcgaacgacctacaccgaactgagatacctacagcgtgagctatgagaaagcgccacgcttcccgaagggagaaaggcggacaggtatccggtaagcggcagggtcggaacaggagagcgcacgagggagcttccagggggaaacgcctggtatctttatagtcctgtcgggtttcgccacctctgacttgagcgtcgatttttgtgatgctcgtcaggggggcggagcctatggaaaaacgccagcaacgcggcctttttacggttcctggccttttgctgg

SEQ ID NO: 55 - DNA, 7148 bp, Artificial
  Synthetic
agacttagggaccctgcggccgccattaattcctaatttttgttgacactctatcattgatagagttattttaccactccctatcagtgatagagaaaagtgaaatgaatagaccggccgctgagaaaaagcgaagcggctttaacaatttatcagacaatctgtgtgggcactcaaagtgacatggattcttaatgtcctcggacactaaatgaataccaagtctcaacgagtgaacacgtaattcattacgaagtttaattcattgagcatcaaacttttaaattgaagagtttgatcatggctcagattgaacgctggcggcaggcctaacacatgcaagtcgaacggtaacaggaagcagcttgctgcttcgctgacgagtggcggacgggtgagtaatgtctgggaaactgcctgatggagggggataactactggaaacggtagctaataccgcataacgtcgcaagaccaaagagggggaccttcgggcctcttgccatcggatgtgcccagatgggattagctagtaggtggggtaacggctcacctaggcgacgatccctagctggtctgagaggatgaccagccacactggaactgagacacggtccagactcctacgggaggcagcagtggggaatattgcacaatgggcgcaagcctgatgcagccatgccgcgtgtatgaagaaggccttcgggttgtaaagtactttcagcggggaggaaggcgataaggttaataaccttgtcgattgacgttacccgcagaagaagcaccggctaactccgtgccagcagccgcggtaatacggagggtgcaagcgttaatcggaattactgggcgtaaagcgcacgcaggcggtctgtcaagtcggatgtgaaatccccgggctcaacctgggaactgcattcgaaactggcaggctagagtcttgtagaggggggtagaattccaggtgtagcggtgaaatgcgtagagatctggaggaataccggtggcgaaggcggccccctggacaaagactgacgctcaggtgcgaaagcgtggggagcaaacaggattagataccctggtagtccacgccgtaaacgatgtcgacttggaggttgtgcccttgaggcgtggcttccggagctaacgcgttaagtcgaccgcctggggagtacggccgcaaggttaaaactcaaatgaattgacgggggcccgcacaagcggtggagcatgtggtttaattcgatgcaacgcgaagaaccttacctactcttgacatccagagaacttagcagagatgctttggtgccttcgggaactctgagacaggtgctgcatggctgtcgtcagctcgtgttgtgaaatgttgggttaagtcccgcaacgagcgcaacccttatcctttgttgccagcggtccggccgggaactcaaaggagactgccagtgataaactggaggaaggtggggatgacgtcaagtcatcatggcccttacgagtagggctacacacgtgctacaatggcgcatacaaagagaagcgacctcgcgagagcaagcggacctcataaagtgcgtcgtagtccggattggagtctgcaactcgactccatgaagtcggaatcgctagtaatcgtggatcagaatgccacggtgaatacgttcccgggccttgtacacaccgcccgtcacaccatgggagtgggttgcaaaagaagtaggtagcttaaccttcgggagggcgcttaccactttgtgattcatgactggggtgaagtcgtaacaaggtaaccgtaggggaacctgcggttggatcatgtggttaccttaaagaacctgcctttgcagtgctcacacagattgtctgatgaatgatgaacttctgaatgtacttttgagtgcattaagaagttttgctctttaaaaatctggatcaagctgaaaattgaaacgacacacagctcatgtgtgttcgagtctctcaaattttcgcaatcagaagtgaaacatcttcgggttgtgaggttaagcgactaagcgtacacggtggatgccctggcagtcagaggcgatgaaggacgtgctaatctgcgaaaagcgccggcgaggtgatatgaacctttgacccggcgatgtccgaatggggaaacccagtgcaatccgttgcactatcgttaactgaatacataggttaacgaggcgaaccgggggaactgaaacatctaagtaccccgaggaaaagaaatcaaccgagattcccccagtagcggcgagcgaacggggagcagcccggagtctgaatcagcttgtgtgttagtggaacggtctggaaagtccgacggtacagggtgatagtcccgtacacgaaagcacacttgctgtgaactcgaagagtagggcgggacacgtggtatcctgtctgaatatggggggaccatcctccaaggctaaatactcctgactgaccgatagtgaaccagtaccgtgagggaaaggcgaaaagaaccccggcgaggggagtgaaaaagaacctgaaaccgtgtacgtacaagcagtgggagcctctttatggggtgactgcgtaccttttgtataatgggtcagcgacttatattctgtagcaaggttaaccgtataggggagccgaagggaaaccgagtcttaactgggcgttaagttgcagggtatagacccgaaacccggtgatctagccatgggcaggttgaaggttgggtaacactaactggaggaccgaaccgactaatgttgaaaaattagcggatgacctgtggctgggggtgaaaggccaatcaaaccgggagatagctggttctccccgaaagctatttaggtagcgcctcgtgaactcatcttcgggggtagagcactgtttcggctagggggccatcccggcttaccaacccgatgcaaactacgaataccgaagaatgttatcacgggagacacacggcgggtgctaacgtccgtcgtgaagagggaaacaacccagaccgccagctaaggtcccaaagtcatggttaagtgggaaacgatgtgggaaggcacagacagccaggatgttggcttagaagcagccatcatttaaagaaagcgtaatagctcactggtcgagtcggcctgcgcggaagatgtaacggggctaaaccatgcaccgaagctgcggcagcgacactatgtgttgttgggtaggggagcgttctgtaagccgttgaaggtgtgctgtgaggcatgctggaggtatcagaagtgcgaatgctgacataagtaacgataaagcgggtgaaaagcccgctcgccggaagaccaagggttcctgtccaacgttaatcggggcagggtgagtcgacccctaaggcgaggccgaaaggcgtagtcgatgggaaacaggttaatattcctgtacttggtgttactgcgaaggggggacggagaaggctatgtcagccgggcgacggttgtcccggtttaagcatgtaggcggaggttccaggtaaatccggtaccttttaacgctgaggtgtgatgacgaggcactacggtgctgaagtgataaatgccctgcttccaggaaaagcctctaagcatcaggtaacacgaaatcgtaccccaaaccgacacaggtggtcaggtagagaataccaaggcgcttgagagaactcgggtgaaggaactaggcaaaatggtgccgtaacttcgggagaaggcacgctgatgtgtaggtgaagcccctgcgggtggagctgaaatcagtcgaagataccagctggctgcaactgtttattaaaaacacagcactgtgcaaacacgaaagtggacgtatacggtgtgacgcctgcccggtgccggaaggttaattgatggggttagcggcaacgcgaagctcttgatcgaagccccggtaaacggcggccgtaactataacggtcctaaggtagcgaaattccttgtcgggtaagttccgacctgcacgaatggcgtaatgatggccaggctgtctccacccgagactcagtgaaattgaactcgctgtgaagatgcagtgtacccgcggcaagacggaaagaccccgtgaacctttactatagcttgacactgaacactggtccttgatgtgtaggataggtgggaggctttgaagcgtggacgccagtctgcgtggagccaaccttgaaataccaccctttaatggctggtgttctaacgtagacccgtaatccgggttgcggacagtgtctggtgggtagtttgactggggcggtctcctcccaaagagtaacggaggagcacgaaggttggctaatcctggtcggacatcaggaggttagtgcaatggcataagccagcttgactgcgagcgtgacggcgcgagcaggtgcgaaagcaggtcatagtgatccggtggttctgaatggaagggccatcgctcaacggataaaaggtactccggggataacaggctgataccgcccaagagttcatatcgacggcggtgtttggcacctcgatgtcggctcatcacatcctggggctgaagtaggtcccaagggtatggctgttcgccatttaaagtggtacgcgagctgggtttagaacgtcgtgagacagttcggtccctatctgccgtgggcgctggagaattgaggggggctgctcctagtacgagaggaccggagtggacgcatcactggtgttcgggttgtcatgccaatggcactgcccggtagctaaatgcggaagagataagtgctgaaagcatctaagcacgaaacttgccccgagatgagttctccctgagaccttgagtctcctgaaggaacgttgaagacgacgacgttgataggtcgggtgtgtaagcgcagcgatgcgttgagctaaccgatactaatgaaccgtgaggcttaaccttacaacgccgaaggtgttttggcgaagagacagacaatcaaatttcagctttgatacagattaacagaatttgcctggcggctttagcgcggtggtcccacctgaccccatgccgaactcagaagtgaaacgccgtagcgccgatggtagtgtggggtctccccatgtgagagtagggaactgccaggcatcaatcaagaagaaccccgtaccgtaaggtgcggggttttttgctttgtacgttctgaaaagtcgggtggtggcccagctttacccgccctacatgctctccctccttgaaactttctcacctttcgcttgcagactcgacattaaccccgtttctgggtatcgttagctgtctggatgtctaaacgtttatacgtatgctgtgaggatttaaggttatgccgattcgggtgcaggacgagctaccagcgcgccgggaaatgtgcgcggaacccctatttgtttatttttctaaatacattcaaatatgtatccgctcatgagacaataaccctgataaatgcttcaataatattgaaaaaggaagagtatgagtattcaacatttccgtgtcgcccttattcccttttttgcggcattttgccttcctgtttttgctcacccagaaacgctggtgaaagtaaaagatgctgaagatcagttgggtgcacgagtgggttacatcgaactggatctcaacagcggtaagatccttgagagttttcgccccgaagaacgttttccaatgatgagcacttttaaagttctgctatgtggcgcggtattatcccgtgttgacgccgggcaagagcaactcggtcgccgcatacactattctcagaatgacttggttgagtactcaccagtcacagaaaagcatcttacggatggcatgacagtaagagaattatgcagtgctgcaataaccatgagtgataacactgcggccaacttacttctgacaacgatcggaggaccgaaggagctaaccgcttttttgcacaacatgggggatcatgtaactcgccttgatcgttgggaaccggagctgaatgaagccataccaaacgacgagcgtgacaccacgatgcctgcagcaatggcaacaacgttgcgcaaactattaactggcgaactacttactctagcttcccggcaacaattaatagactggatggaggcggataaagttgcaggaccacttctgcgctcggcccttccggctagctggtttattgctgataaatctggagccggtgagcgtgggtctcgcggtatcattgcagcactggggccagatggtaagccctcccgtatcgtagttatctacacgacggggagtcaggcaactatggatgaacgaaatagacagatcgctgagataggtgcctcactgattaagcattggtaactgcagaccaagtttactcatatatactttagattgatttaaaacttcatttttaatttaaaaggatctaggtgaagatcctttttgataatctcatgaccaaaatcccttaacgtgagttttcgttccactgagcgtcagaccccgtagaaaagatcaaaggatcttcttgagatcctttttttctgcgcgtaatctgctgcttgcaaacaaaaaaaccaccgctaccagcggtggtttgtttgccggatcaagagctaccaactctttttccgaaggtaactggcttcagcagagcgcagataccaaatactgtccttctagtgtagccgtagttaggccaccacttcaagaactctgtagcaccgcctacatacctcgctctgctaatcctgttaccagtggctgctgccagtggcgataagtcgtgtcttaccgggttggactcaagacgatagttaccggataaggcgcagcggtcgggctgaacggggggttcgtgcacacagcccagcttggagcgaacgacctacaccgaactgagatacctacagcgtgagctatgagaaagcgccacgcttcccgaagggagaaaggcggacaggtatccggtaagcggcagggtcggaacaggagagcgcacgagggagcttccagggggaaacgcctggtatctttatagtcctgtcgggtttcgccacctctgacttgagcgtcgatttttgtgatgctcgtcaggggggcggagcctatggaaaaacgccagcaacgcggcctttttacggttcctggccttttgctgg

SEQ ID NO: 56 - DNA, 7418 bp, Artificial
  Synthetic
agacttagggaccctgcggccgccattaattcctaatttttgttgacactctatcattgatagagttattttaccactccctatcagtgatagagaaaagtgaaatgaatagaccggccgctgagaaaaagcgaagcggcactgctctttaacaatttatcagacaatctgtgtgggcactcgaagatacggattcttaacgtcgcaagacgaaaaatgaataccaagtctcaagagtgaacacgtaattcattacgaagtttaattctttgagcgtcaaacttttaaattgaagagtttgatcatggctcagattgaacgctggcggcaggcctaacacatgcaagtcgaacggtaacaggaagcagcttgctgcttcgctgacgagtggcggacgggtgagtaatgtctgggaaactgcctgatggagggggataactactggaaacggtagctaataccgcataacgtcgcaagaccaaagagggggaccttcgggcctcttgccatcggatgtgcccagatgggattagctagtaggtggggtaacggctcacctaggcgacgatccctagctggtctgagaggatgaccagccacactggaactgagacacggtccagactcctacgggaggcagcagtggggaatattgcacaatgggcgcaagcctgatgcagccatgccgcgtgtatgaagaaggccttcgggttgtaaagtactttcagcggggaggaaggcgataaggttaataaccttgtcgattgacgttacccgcagaagaagcaccggctaactccgtgccagcagccgcggtaatacggagggtgcaagcgttaatcggaattactgggcgtaaagcgcacgcaggcggtctgtcaagtcggatgtgaaatccccgggctcaacctgggaactgcattcgaaactggcaggctagagtcttgtagaggggggtagaattccaggtgtagcggtgaaatgcgtagagatctggaggaataccggtggcgaaggcggccccctggacaaagactgacgctcaggtgcgaaagcgtggggagcaaacaggattagataccctggtagtccacgccgtaaacgatgtcgacttggaggttgtgcccttgaggcgtggcttccggagctaacgcgttaagtcgaccgcctggggagtacggccgcaaggttaaaactcaaatgaattgacgggggcccgcacaagcggtggagcatgtggtttaattcgatgcaacgcgaagaaccttacctactcttgacatccagagaacttagcagagatgctttggtgccttcgggaactctgagacaggtgctgcatggctgtcgtcagctcgtgttgtgaaatgttgggttaagtcccgcaacgagcgcaacccttatcctttgttgccagcggtccggccgggaactcaaaggagactgccagtgataaactggaggaaggtggggatgacgtcaagtcatcatggcccttacgagtagggctacacacgtgctacaatggcgcatacaaagagaagcgacctcgcgagagcaagcggacctcataaagtgcgtcgtagtccggattggagtctgcaactcgactccatgaagtcggaatcgctagtaatcgtggatcagaatgccacggtgaatacgttcccgggccttgtacacaccgcccgtcacaccatgggagtgggttgcaaaagaagtaggtagcttaaccttcgggagggcgcttaccactttgtgattcatgactggggtgaagtcgtaacaaggtaaccgtaggggaacctgcggttggatcatgtggttaccttaaagaagcgtactttgtagtgctcacacagattgtctgatagaaagtgaaaagcaaggcgtttacgcgttgggagtgaggctgaagagaataaggccgttcgctttctattaatgaaagctcaccctacacgaaaatatcacgcaacgcgtgataagcaattttcgtgtccccttcgtctagaggcccaggacaccgccctttcacggcggtaacaggggttcgaatcccctaggggacgccacttgctggtttgtgagtgaaagtcgccgaccttaatatctcaaaactcatcttcgggtgatgtttgagatatttgctctttaaaaatctggatcaagctgaaaattgaaacactgaacaacgagagttgttcgtgagtctctcaaattttcgcaacacgatgatgaatcgaaagaaacatcttcgggttgtgaggttaagcgactaagcgtacacggtggatgccctggcagtcagaggcgatgaaggacgtgctaatctgcgaaaagcgccggcgaggtgatatgaacctttgacccggcgatgtccgaatggggaaacccagtgcaatccgttgcactatcgttaactgaatacataggttaacgaggcgaaccgggggaactgaaacatctaagtaccccgaggaaaagaaatcaaccgagattcccccagtagcggcgagcgaacggggagcagcccggagtctgaatcagcttgtgtgttagtggaacggtctggaaagtccgacggtacagggtgatagtcccgtacacgaaagcacacttgctgtgaactcgaagagtagggcgggacacgtggtatcctgtctgaatatggggggaccatcctccaaggctaaatactcctgactgaccgatagtgaaccagtaccgtgagggaaaggcgaaaagaaccccggcgaggggagtgaaaaagaacctgaaaccgtgtacgtacaagcagtgggagcctctttatggggtgactgcgtaccttttgtataatgggtcagcgacttatattctgtagcaaggttaaccgtataggggagccgaagggaaaccgagtcttaactgggcgttaagttgcagggtatagacccgaaacccggtgatctagccatgggcaggttgaaggttgggtaacactaactggaggaccgaaccgactaatgttgaaaaattagcggatgacctgtggctgggggtgaaaggccaatcaaaccgggagatagctggttctccccgaaagctatttaggtagcgcctcgtgaactcatcttcgggggtagagcactgtttcggctagggggccatcccggcttaccaacccgatgcaaactacgaataccgaagaatgttatcacgggagacacacggcgggtgctaacgtccgtcgtgaagagggaaacaacccagaccgccagctaaggtcccaaagtcatggttaagtgggaaacgatgtgggaaggcacagacagccaggatgttggcttagaagcagccatcatttaaagaaagcgtaatagctcactggtcgagtcggcctgcgcggaagatgtaacggggctaaaccatgcaccgaagctgcggcagcgacactatgtgttgttgggtaggggagcgttctgtaagccgttgaaggtgtgctgtgaggcatgctggaggtatcagaagtgcgaatgctgacataagtaacgataaagcgggtgaaaagcccgctcgccggaagaccaagggttcctgtccaacgttaatcggggcagggtgagtcgacccctaaggcgaggccgaaaggcgtagtcgatgggaaacaggttaatattcctgtacttggtgttactgcgaaggggggacggagaaggctatgtcagccgggcgacggttgtcccggtttaagcatgtaggcggaggttccaggtaaatccggtaccttttaacgctgaggtgtgatgacgaggcactacggtgctgaagtgataaatgccctgcttccaggaaaagcctctaagcatcaggtaacacgaaatcgtaccccaaaccgacacaggtggtcaggtagagaataccaaggcgcttgagagaactcgggtgaaggaactaggcaaaatggtgccgtaacttcgggagaaggcacgctgatgtgtaggtgaagcccctgcgggtggagctgaaatcagtcgaagataccagctggctgcaactgtttattaaaaacacagcactgtgcaaacacgaaagtggacgtatacggtgtgacgcctgcccggtgccggaaggttaattgatggggttagcggcaacgcgaagctcttgatcgaagccccggtaaacggcggccgtaactataacggtcctaaggtagcgaaattccttgtcgggtaagttccgacctgcacgaatggcgtaatgatggccaggctgtctccacccgagactcagtgaaattgaactcgctgtgaagatgcagtgtacccgcggcaagacggaaagaccccgtgaacctttactatagcttgacactgaacactggtccttgatgtgtaggataggtgggaggctttgaagcgtggacgccagtctgcgtggagccaaccttgaaataccaccctttaatggctggtgttctaacgtagacccgtaatccgggttgcggacagtgtctggtgggtagtttgactggggcggtctcctcccaaagagtaacggaggagcacgaaggttggctaatcctggtcggacatcaggaggttagtgcaatggcataagccagcttgactgcgagcgtgacggcgcgagcaggtgcgaaagcaggtcatagtgatccggtggttctgaatggaagggccatcgctcaacggataaaaggtactccggggataacaggctgataccgcccaagagttcatatcgacggcggtgtttggcacctcgatgtcggctcatcacatcctggggctgaagtaggtcccaagggtatggctgttcgccatttaaagtggtacgcgagctgggtttagaacgtcgtgagacagttcggtccctatctgccgtgggcgctggagaattgaggggggctgctcctagtacgagaggaccggagtggacgcatcactggtgttcgggttgtcatgccaatggcactgcccggtagctaaatgcggaagagataagtgctgaaagcatctaagcacgaaacttgccccgagatgagttctccctgagaccttgagtctcctgaaggaacgttgaagacgacgacgttgataggtcgggtgtgtaagcgcagcgatgcgttgagctaaccgatactaatgaaccgtgaggcttaaccttacaacgccgaagctgttttggcggatgagagaagattttcagcctgatacagattaaatcagaacgcagaagcggtctgataaaacagaatttgcctggcggctttagcgcggtggtcccacctgaccccatgccgaactcagaagtgaaacgccgtagcgccgatggtagtgtggggtctccccatgtgagagtagggaactgccaggcatcaaataaaacgaaaggctcagtcgaaagactgggcctttcgttttatctgttgtttgtcggtgaacgctctcctgagtaggacaaatccgccgggagcggatttgaacgttgcgaagcaacggcccggagggtggcgggcaggacgcccgccataaactgccaggcatcaaattaagcagaaggccatcctgacggatggcctttttgcgtttctacaaactcttcctgtcgtcatatctacaagccggcgcgccgggaaatgtgcgcggaacccctatttgtttatttttctaaatacattcaaatatgtatccgctcatgagacaataaccctgataaatgcttcaataatattgaaaaaggaagagtatgagtattcaacatttccgtgtcgcccttattcccttttttgcggcattttgccttcctgtttttgctcacccagaaacgctggtgaaagtaaaagatgctgaagatcagttgggtgcacgagtgggttacatcgaactggatctcaacagcggtaagatccttgagagttttcgccccgaagaacgttttccaatgatgagcacttttaaagttctgctatgtggcgcggtattatcccgtgttgacgccgggcaagagcaactcggtcgccgcatacactattctcagaatgacttggttgagtactcaccagtcacagaaaagcatcttacggatggcatgacagtaagagaattatgcagtgctgcaataaccatgagtgataacactgcggccaacttacttctgacaacgatcggaggaccgaaggagctaaccgcttttttgcacaacatgggggatcatgtaactcgccttgatcgttgggaaccggagctgaatgaagccataccaaacgacgagcgtgacaccacgatgcctgcagcaatggcaacaacgttgcgcaaactattaactggcgaactacttactctagcttcccggcaacaattaatagactggatggaggcggataaagttgcaggaccacttctgcgctcggcccttccggctagctggtttattgctgataaatctggagccggtgagcgtgggtctcgcggtatcattgcagcactggggccagatggtaagccctcccgtatcgtagttatctacacgacggggagtcaggcaactatggatgaacgaaatagacagatcgctgagataggtgcctcactgattaagcattggtaactgcagaccaagtttactcatatatactttagattgatttaaaacttcatttttaatttaaaaggatctaggtgaagatcctttttgataatctcatgaccaaaatcccttaacgtgagttttcgttccactgagcgtcagaccccgtagaaaagatcaaaggatcttcttgagatcctttttttctgcgcgtaatctgctgcttgcaaacaaaaaaaccaccgctaccagcggtggtttgtttgccggatcaagagctaccaactctttttccgaaggtaactggcttcagcagagcgcagataccaaatactgtccttctagtgtagccgtagttaggccaccacttcaagaactctgtagcaccgcctacatacctcgctctgctaatcctgttaccagtggctgctgccagtggcgataagtcgtgtcttaccgggttggactcaagacgatagttaccggataaggcgcagcggtcgggctgaacggggggttcgtgcacacagcccagcttggagcgaacgacctacaccgaactgagatacctacagcgtgagctatgagaaagcgccacgcttcccgaagggagaaaggcggacaggtatccggtaagcggcagggtcggaacaggagagcgcacgagggagcttccagggggaaacgcctggtatctttatagtcctgtcgggtttcgccacctctgacttgagcgtcgatttttgtgatgctcgtcaggggggcggagcctatggaaaaacgccagcaacgcggcctttttacggttcctggccttttgctgg

SEQ ID NO: 57 - DNA, 7503 bp, Artificial
  Synthetic
agacttagggaccctgcggccgccattaattcctaatttttgttgacactctatcattgatagagttattttaccactccctatcagtgatagagaaaagtgaaatgaatagaccggccgctgagaaaaagcgaagcggccagacaatctgtgtgggcactccacaagacgatatccagcatcttcggatgcaaaaaaatatcaagtcttgaagagtgactaactgaagtaaaattcatgcagtaaatctttgagcatcgcttctcgagtggaagcaaatcaagcttttaattgaagagtttgatcatggctcagattgaacgctggcggcaggcttaacacatgcaagtcgagcggtagcacaggggagcttgctccctgggtgacgagcggcggacgggtgagtaatgtctgggaaactgcctgatggagggggataactactggaaacggtagctaataccgcataacgtcgcaagaccaaagagggggaccttcgggcctcttgccatcagatgtgcccagatgggattagctagtaggtggggtaatggctcacctaggcgacgatccctagctggtctgagaggatgaccagccacactggaactgagacacggtccagactcctacgggaggcagcagtggggaatattgcacaatgggcgcaagcctgatgcagccatgccgcgtgtgtgaagaaggccttcgggttgtaaagcactttcagcgaggaggaaggtggtgagcttaatacgctcatcaattgacgttactcgcagaagaagcaccggctaactccgtgccagcagccgcggtaatacggagggtgcaagcgttaatcggaattactgggcgtaaagcgcacgcaggcggtttgttaagtcagatgtgaaatccccgggctcaacctgggaactgcatttgaaactggcaagctagagtctcgtagaggggggtagaattccaggtgtagcggtgaaatgcgtagagatctggaggaataccggtggcgaaggcggccccctggacgaagactgacgctcaggtgcgaaagcgtggggagcaaacaggattagataccctggtagtccacgctgtaaacgatgtcgatttggaggttgtgcccttgaggcgtggcttccggagctaacgcgttaaatcgaccgcctggggagtacggccgcaaggttaaaactcaaatgaattgacgggggcccgcacaagcggtggagcatgtggtttaattcgatgcaacgcgaagaaccttacctactcttgacatccagagaacttagcagagatgctttggtgccttcgggaactctgagacaggtgctgcatggctgtcgtcagctcgtgttgtgaaatgttgggttaagtcccgcaacgagcgcaacccttatcctttgttgccagcggttcggccgggaactcaaaggagactgccagtgataaactggaggaaggtggggatgacgtcaagtcatcatggcccttacgagtagggctacacacgtgctacaatggcatatacaaagagaagcgacctcgcgagagcaagcggacctcataaagtatgtcgtagtccggattggagtctgcaactcgactccatgaagtcggaatcgctagtaatcgtagatcagaatgctacggtgaatacgttcccgggccttgtacacaccgcccgtcacaccatgggagtgggttgcaaaagaagtaggtagcttaaccttcgggagggcgcttaccactttgtgattcatgactggggtgaagtcgtaacaaggtaaccgtaggggaacctgcggttggatcacctccttacctaaagatattagttcgagtggcgtgctcacacagattgtctgatgaaaaagtaatgagcaaacaaaaccttgtggtataggtaagtgccgggagatttgtgactgtccagtgcagtgacaaacgacaatggcgctcgatttttcacgaaaaatctcacctttacccgaaattatcgaatcggtgattcgataagccaatttcgggtccccatcgtctagaggcctaggacactgccctttcacggctgtaacaggggttcgaatccccttggggacgccattccgataatgagtgaaagacattatcaccggttagcgataaccgaaaaaaatcttaaagatgacttgcgagtcatgtttaagatattgctctttaacaatctggaacaagctgaaaattgaaacatgacggctgaaatttatccctccgtagaagtactgggatgaagagtaacctgtcatagagtctctcaaatgtttgcagcgcgaacgatggaaacatcttcgggttgtgaggttaagtgactaagcgtacacggtggatgcctaggcagtcagaggcgatgaagggcgtgctaatctgcgaaaagcgtcggtaaggtgatatgaaccgttataaccggcgatacccgaatggggaaacccagtgtgtttcgacacactatcatgtcatgaatacatagtggcatgaggcgaaccgggggaactgaaacatctaagtaccccgaggaaaagaaatcaaccgagattcccccagtagcggcgagcgaacggggaggagcccagaacctgaatcggcttgtgtgttagtggaagcgtctggaaagtcgcgcagcaaagggtgatagccccgtacactaaaatgcacaggtcgtgagttcgatgagtagggcgggacacgtgacatcctgtctgaatatggggggaccatcctccaaggctaaatactcctgactgaccgatagtgaaccagtaccgtgagggaaaggcgaaaagaaccccggcgaggggagtgaaatagaacctgaaaccgtgtacgtacaagcagtgggagcaccttcgtggtgtgactgcgtaccttttgtataatgggtcagcgacttatattttgtagcaaggttaaccgtataggggagccgtagggaaaccgagtcttaactgggcgaatagttgcaaggtatagacccgaaacccggtgatctagccatgggcaggttgaaggttgggtaacactaactggaggaccgaaccgactaatgttgaaaaattagcggatgacttgtggctgggggtgaaaggccaatcaaaccgggagatagctggttctccccgaaagctatttaggtagcgcctcgtgaactcatcttcgggggtagagcactgtttcggctagggggccatcccggcttaccaaaccgatgcaaactccgaataccgaagaatgttatcacgggagacacacggcgggtgctaacgtccgtcgtgaagagggaaacaacccagaccgccagctaaggtcccaaagtcatggttaagtgggaaacgatgtgggaaggcatagacagccaggatgttggcttagaagcagccatcatttaaagaaagcgtaatagctcactggtcgagtcggcctgcgcggaagatgtaacggggctaaaccatgcaccgaagctgcggcagcgacgcttaggcgttgttgggtaggggagcgttctgtaagccgttgaaggtggcctgtgagggttgctggaggtatcagaagtgcgaatgctgacataagtaacgataaagcgggtgaaaagcccgctcgccggaagaccaagggttcctgtccaacgttaatcggggcagggtgagtcgacccctaaggcgaggctgaaaagcgtagtcgatgggaaacaggttaatattcctgtacttggtgttactgcgaaggggggacggagaaggctaggctagccgggcgacggttgtcccggtttaagcgtgtagggggtgtgacctggtaaatccggttgcatattaaccctgaggcgtgatgacgatgcactacggtgcagaagtagttgatgccctgcttccaggaaaatcctctaagcatcaggtaacattaaatcgtaccccaaaccgacacaggtggtcaggtagagaataccaaggcgcttgagagaactcgggtgaaggaactaggcaaaatggtgccgtaacttcgggagaaggcacgctggcatgtaggtgaagtccctcgcggatggagctgaagccagtcgaagataccagctggctgcaactgtttaataaaaacacagcactgtgcaaacacgaaagtggacgtatacggtgtgacgcctgcccggtgctggaaggttaattgatggggtcagccgcaaggcgaagctcttgatcgaagccccagtaaacggcggccgtaactataacggtcctaaggtagcgaaattccttgtcgggtaagttccgacctgcacgaatggcgtaatgatggccaggctgtctccacccgagactcagtgaaattgaactcgctgtgaagatgcagtgtacccgcggcaagacggaaagaccccgtgaacctttactatagcttgacactgaacattgagccttgatgtgtaggataggtgggaggctttgaagcgtggacgccagtctgcgtggagccatccttgaaataccaccctttaatgtttgatgttctaactcggccccgtaatccggggtgaggacagtgtctggtgggtagtttgactggggcggtctcctcccaaagagtaacggaggagcacgaaggttagctaatcacggtcggacatcgtgaggttagtgcaaaggcataagctagcttgactgcgagagtgacggctcgagcaggtacgaaagtaggtcttagtgatccggtggttctgaatggaagggccatcgctcaacggataaaaggtactccggggataacaggctgataccgcccaagagttcatatcgacggcggtgtttggcacctcgatgtcggctcatcacatcctggggctgaagtaggtcccaagggtatggctgttcgccatttaaagtggtacgcgagctgggtttagaacgtcgtgagacagttcggtccctatctgccgtgggcgttggaagattgagaggggttgctcctagtacgagaggaccggagtgaacgcaccactggtgttcgggttgtcatgccaatggcattgcccggtagctaagtgcggaaaagataagcgctgaaagcatctaagcgcgaaacttgcctcaagatgagtcttccctgggcctttaaggtccctgaaggaacgtttaagactaagacgttgataggctgggtgtgtaagtgcagcgatgcattgagctaaccagtactaatgatccgtgaggcttaaccttacaacaccgaaggtgtttttagagagattttcagcgaagttccgagattggttctgatggcttcacgggagtgaggcggttggaatgaaacagaatttgcctggcggcaatagcgcggtggtcccacctgaccccatgccgaactcagaagtgaaacgccgtagcgccgatggtagtgtggggtctccccatgcgagagtaggacactgccaggcatcaaataaacgttatcagtgtgacgactggtaatgcgcaaatcgcaaagcgcgaatttgccggcatcgaaagatgcaacgtaaaagaatcggtggagcggtagttcagttggttagaatacctgcctgtcacgcagggggtcgcgggttcgagccccgtccgttccgccacttaattgataagccctgagtctctgactcagggctttttcatatctatattttgcgattttcaggccggaattgtgcgcgccgggaaatgtgcgcggaacccctatttgtttatttttctaaatacattcaaatatgtatccgctcatgagacaataaccctgataaatgcttcaataatattgaaaaaggaagagtatgagtattcaacatttccgtgtcgcccttattcccttttttgcggcattttgccttcctgtttttgctcacccagaaacgctggtgaaagtaaaagatgctgaagatcagttgggtgcacgagtgggttacatcgaactggatctcaacagcggtaagatccttgagagttttcgccccgaagaacgttttccaatgatgagcacttttaaagttctgctatgtggcgcggtattatcccgtgttgacgccgggcaagagcaactcggtcgccgcatacactattctcagaatgacttggttgagtactcaccagtcacagaaaagcatcttacggatggcatgacagtaagagaattatgcagtgctgcaataaccatgagtgataacactgcggccaacttacttctgacaacgatcggaggaccgaaggagctaaccgcttttttgcacaacatgggggatcatgtaactcgccttgatcgttgggaaccggagctgaatgaagccataccaaacgacgagcgtgacaccacgatgcctgcagcaatggcaacaacgttgcgcaaactattaactggcgaactacttactctagcttcccggcaacaattaatagactggatggaggcggataaagttgcaggaccacttctgcgctcggcccttccggctagctggtttattgctgataaatctggagccggtgagcgtgggtctcgcggtatcattgcagcactggggccagatggtaagccctcccgtatcgtagttatctacacgacggggagtcaggcaactatggatgaacgaaatagacagatcgctgagataggtgcctcactgattaagcattggtaactgcagaccaagtttactcatatatactttagattgatttaaaacttcatttttaatttaaaaggatctaggtgaagatcctttttgataatctcatgaccaaaatcccttaacgtgagttttcgttccactgagcgtcagaccccgtagaaaagatcaaaggatcttcttgagatcctttttttctgcgcgtaatctgctgcttgcaaacaaaaaaaccaccgctaccagcggtggtttgtttgccggatcaagagctaccaactctttttccgaaggtaactggcttcagcagagcgcagataccaaatactgtccttctagtgtagccgtagttaggccaccacttcaagaactctgtagcaccgcctacatacctcgctctgctaatcctgttaccagtggctgctgccagtggcgataagtcgtgtcttaccgggttggactcaagacgatagttaccggataaggcgcagcggtcgggctgaacggggggttcgtgcacacagcccagcttggagcgaacgacctacaccgaactgagatacctacagcgtgagctatgagaaagcgccacgcttcccgaagggagaaaggcggacaggtatccggtaagcggcagggtcggaacaggagagcgcacgagggagcttccagggggaaacgcctggtatctttatagtcctgtcgggtttcgccacctctgacttgagcgtcgatttttgtgatgctcgtcaggggggcggagcctatggaaaaacgccagcaacgcggcctttttacggttcctggccttttgctgg

SEQ ID NO: 58 - DNA, 7421 bp, Artificial
  Synthetic
agacttagggaccctgcggccgccattaattcctaatttttgttgacactctatcattgatagagttattttaccactccctatcagtgatagagaaaagtgaaatgaatagaccggccgctgagaaaaagcgaagcggcactgctctttaacaatttatcagacaatctgtgtgggcactcgaagatacggattcttaacgtcgcaagacgaaaaatgaataccaagtctcaagagtgaacacgtaattcattacgaagtttaattctttgagcgtcaaactttttaattgaagagtttgatcatggctcagattgaacgctggcggcaggcttaacacatgcaagtcgagcggtagcacaggggagcttgctccctgggtgacgagcggcggacgggtgagtaatgtctgggaaactgcctgatggagggggataactactggaaacggtagctaataccgcataacgtcgcaagaccaaagagggggaccttcgggcctcttgccatcagatgtgcccagatgggattagctagtaggtggggtaatggctcacctaggcgacgatccctagctggtctgagaggatgaccagccacactggaactgagacacggtccagactcctacgggaggcagcagtggggaatattgcacaatgggcgcaagcctgatgcagccatgccgcgtgtgtgaagaaggccttcgggttgtaaagcactttcagcgaggaggaaggtggtgagcttaatacgctcatcaattgacgttactcgcagaagaagcaccggctaactccgtgccagcagccgcggtaatacggagggtgcaagcgttaatcggaattactgggcgtaaagcgcacgcaggcggtttgttaagtcagatgtgaaatccccgggctcaacctgggaactgcatttgaaactggcaagctagagtctcgtagaggggggtagaattccaggtgtagcggtgaaatgcgtagagatctggaggaataccggtggcgaaggcggccccctggacgaagactgacgctcaggtgcgaaagcgtggggagcaaacaggattagataccctggtagtccacgctgtaaacgatgtcgatttggaggttgtgcccttgaggcgtggcttccggagctaacgcgttaaatcgaccgcctggggagtacggccgcaaggttaaaactcaaatgaattgacgggggcccgcacaagcggtggagcatgtggtttaattcgatgcaacgcgaagaaccttacctactcttgacatccagagaacttagcagagatgctttggtgccttcgggaactctgagacaggtgctgcatggctgtcgtcagctcgtgttgtgaaatgttgggttaagtcccgcaacgagcgcaacccttatcctttgttgccagcggttcggccgggaactcaaaggagactgccagtgataaactggaggaaggtggggatgacgtcaagtcatcatggcccttacgagtagggctacacacgtgctacaatggcatatacaaagagaagcgacctcgcgagagcaagcggacctcataaagtatgtcgtagtccggattggagtctgcaactcgactccatgaagtcggaatcgctagtaatcgtagatcagaatgctacggtgaatacgttcccgggccttgtacacaccgcccgtcacaccatgggagtgggttgcaaaagaagtaggtagcttaaccttcgggagggcgcttaccactttgtgattcatgactggggtgaagtcgtaacaaggtaaccgtaggggaacctgcggttggatcacctccttaccttaaagaagcgtactttgtagtgctcacacagattgtctgatagaaagtgaaaagcaaggcgtttacgcgttgggagtgaggctgaagagaataaggccgttcgctttctattaatgaaagctcaccctacacgaaaatatcacgcaacgcgtgataagcaattttcgtgtccccttcgtctagaggcccaggacaccgccctttcacggcggtaacaggggttcgaatcccctaggggacgccacttgctggtttgtgagtgaaagtcgccgaccttaatatctcaaaactcatcttcgggtgatgtttgagatatttgctctttaaaaatctggatcaagctgaaaattgaaacactgaacaacgagagttgttcgtgagtctctcaaattttcgcaacacgatgatgaatcgaaagaaacatcttcgggttgtgaggttaagtgactaagcgtacacggtggatgcctaggcagtcagaggcgatgaagggcgtgctaatctgcgaaaagcgtcggtaaggtgatatgaaccgttataaccggcgatacccgaatggggaaacccagtgtgtttcgacacactatcatgtcatgaatacatagtggcatgaggcgaaccgggggaactgaaacatctaagtaccccgaggaaaagaaatcaaccgagattcccccagtagcggcgagcgaacggggaggagcccagaacctgaatcggcttgtgtgttagtggaagcgtctggaaagtcgcgcagcaaagggtgatagccccgtacactaaaatgcacaggtcgtgagttcgatgagtagggcgggacacgtgacatcctgtctgaatatggggggaccatcctccaaggctaaatactcctgactgaccgatagtgaaccagtaccgtgagggaaaggcgaaaagaaccccggcgaggggagtgaaatagaacctgaaaccgtgtacgtacaagcagtgggagcaccttcgtggtgtgactgcgtaccttttgtataatgggtcagcgacttatattttgtagcaaggttaaccgtataggggagccgtagggaaaccgagtcttaactgggcgaatagttgcaaggtatagacccgaaacccggtgatctagccatgggcaggttgaaggttgggtaacactaactggaggaccgaaccgactaatgttgaaaaattagcggatgacttgtggctgggggtgaaaggccaatcaaaccgggagatagctggttctccccgaaagctatttaggtagcgcctcgtgaactcatcttcgggggtagagcactgtttcggctagggggccatcccggcttaccaaaccgatgcaaactccgaataccgaagaatgttatcacgggagacacacggcgggtgctaacgtccgtcgtgaagagggaaacaacccagaccgccagctaaggtcccaaagtcatggttaagtgggaaacgatgtgggaaggcatagacagccaggatgttggcttagaagcagccatcatttaaagaaagcgtaatagctcactggtcgagtcggcctgcgcggaagatgtaacggggctaaaccatgcaccgaagctgcggcagcgacgcttaggcgttgttgggtaggggagcgttctgtaagccgttgaaggtggcctgtgagggttgctggaggtatcagaagtgcgaatgctgacataagtaacgataaagcgggtgaaaagcccgctcgccggaagaccaagggttcctgtccaacgttaatcggggcagggtgagtcgacccctaaggcgaggctgaaaagcgtagtcgatgggaaacaggttaatattcctgtacttggtgttactgcgaaggggggacggagaaggctaggctagccgggcgacggttgtcccggtttaagcgtgtagggggtgtgacctggtaaatccggttgcatattaaccctgaggcgtgatgacgatgcactacggtgcagaagtagttgatgccctgcttccaggaaaatcctctaagcatcaggtaacattaaatcgtaccccaaaccgacacaggtggtcaggtagagaataccaaggcgcttgagagaactcgggtgaaggaactaggcaaaatggtgccgtaacttcgggagaaggcacgctggcatgtaggtgaagtccctcgcggatggagctgaagccagtcgaagataccagctggctgcaactgtttaataaaaacacagcactgtgcaaacacgaaagtggacgtatacggtgtgacgcctgcccggtgctggaaggttaattgatggggtcagccgcaaggcgaagctcttgatcgaagccccagtaaacggcggccgtaactataacggtcctaaggtagcgaaattccttgtcgggtaagttccgacctgcacgaatggcgtaatgatggccaggctgtctccacccgagactcagtgaaattgaactcgctgtgaagatgcagtgtacccgcggcaagacggaaagaccccgtgaacctttactatagcttgacactgaacattgagccttgatgtgtaggataggtgggaggctttgaagcgtggacgccagtctgcgtggagccatccttgaaataccaccctttaatgtttgatgttctaactcggccccgtaatccggggtgaggacagtgtctggtgggtagtttgactggggcggtctcctcccaaagagtaacggaggagcacgaaggttagctaatcacggtcggacatcgtgaggttagtgcaaaggcataagctagcttgactgcgagagtgacggctcgagcaggtacgaaagtaggtcttagtgatccggtggttctgaatggaagggccatcgctcaacggataaaaggtactccggggataacaggctgataccgcccaagagttcatatcgacggcggtgtttggcacctcgatgtcggctcatcacatcctggggctgaagtaggtcccaagggtatggctgttcgccatttaaagtggtacgcgagctgggtttagaacgtcgtgagacagttcggtccctatctgccgtgggcgttggaagattgagaggggttgctcctagtacgagaggaccggagtgaacgcaccactggtgttcgggttgtcatgccaatggcattgcccggtagctaagtgcggaaaagataagcgctgaaagcatctaagcgcgaaacttgcctcaagatgagtcttccctgggcctttaaggtccctgaaggaacgtttaagactaagacgttgataggctgggtgtgtaagtgcagcgatgcattgagctaaccagtactaatgatccgtgaggcttaaccttacaacgccgaagctgttttggcggatgagagaagattttcagcctgatacagattaaatcagaacgcagaagcggtctgataaaacagaattgcctggcggcaatagcgcggtggtcccacctgaccccatgccgaactcagaagtgaaacgccgtagcgccgatggtagtgtggggtctccccatgcgagagtaggacactgccaggcatcaaataaaacgaaaggctcagtcgaaagactgggcctttcgttttatctgttgtttgtcggtgaacgctctcctgagtaggacaaatccgccgggagcggatttgaacgttgcgaagcaacggcccggagggtggcgggcaggacgcccgccataaactgccaggcatcaaattaagcagaaggccatcctgacggatggcctttttgcgtttctacaaactcttcctgtcgtcatatctacaagccggcgcgccgggaaatgtgcgcggaacccctatttgtttatttttctaaatacattcaaatatgtatccgctcatgagacaataaccctgataaatgcttcaataatattgaaaaaggaagagtatgagtattcaacatttccgtgtcgcccttattcccttttttgcggcattttgccttcctgtttttgctcacccagaaacgctggtgaaagtaaaagatgctgaagatcagttgggtgcacgagtgggttacatcgaactggatctcaacagcggtaagatccttgagagttttcgccccgaagaacgttttccaatgatgagcacttttaaagttctgctatgtggcgcggtattatcccgtgttgacgccgggcaagagcaactcggtcgccgcatacactattctcagaatgacttggttgagtactcaccagtcacagaaaagcatcttacggatggcatgacagtaagagaattatgcagtgctgcaataaccatgagtgataacactgcggccaacttacttctgacaacgatcggaggaccgaaggagctaaccgcttttttgcacaacatgggggatcatgtaactcgccttgatcgttgggaaccggagctgaatgaagccataccaaacgacgagcgtgacaccacgatgcctgcagcaatggcaacaacgttgcgcaaactattaactggcgaactacttactctagcttcccggcaacaattaatagactggatggaggcggataaagttgcaggaccacttctgcgctcggcccttccggctagctggtttattgctgataaatctggagccggtgagcgtgggtctcgcggtatcattgcagcactggggccagatggtaagccctcccgtatcgtagttatctacacgacggggagtcaggcaactatggatgaacgaaatagacagatcgctgagataggtgcctcactgattaagcattggtaactgcagaccaagtttactcatatatactttagattgatttaaaacttcatttttaatttaaaaggatctaggtgaagatcctttttgataatctcatgaccaaaatcccttaacgtgagttttcgttccactgagcgtcagaccccgtagaaaagatcaaaggatcttcttgagatcctttttttctgcgcgtaatctgctgcttgcaaacaaaaaaaccaccgctaccagcggtggtttgtttgccggatcaagagctaccaactctttttccgaaggtaactggcttcagcagagcgcagataccaaatactgtccttctagtgtagccgtagttaggccaccacttcaagaactctgtagcaccgcctacatacctcgctctgctaatcctgttaccagtggctgctgccagtggcgataagtcgtgtcttaccgggttggactcaagacgatagttaccggataaggcgcagcggtcgggctgaacggggggttcgtgcacacagcccagcttggagcgaacgacctacaccgaactgagatacctacagcgtgagctatgagaaagcgccacgcttcccgaagggagaaaggcggacaggtatccggtaagcggcagggtcggaacaggagagcgcacgagggagcttccagggggaaacgcctggtatctttatagtcctgtcgggtttcgccacctctgacttgagcgtcgatttttgtgatgctcgtcaggggggcggagcctatggaaaaacgccagcaacgcggcctttttacggttcctggccttttgctgg

SEQ ID NO: 59 - DNA, 7503 bp, Artificial
  Synthetic
agacttagggaccctgcggccgccattaattcctaatttttgttgacactctatcattgatagagttattttaccactccctatcagtgatagagaaaagtgaaatgaatagaccggccgctgagaaaaagcgaagcggccagacaatctgtgtgggcactccacaagacgatatccagcatcttcggatgcaaaaaaatatcaagtcttgaagagtgactaactgaagtaaaattcatgcagtaaatctttgagcatcgcttctcgagtggaagcaaatcaagcttttaattgaagagtttgatcatggctcagattgaacgctggcggcaggcttaacacatgcaagtcgagcggtagcacaggggagcttgctccctgggtgacgagcggcggacgggtgagtaatgtctgggaaactgcctgatggagggggataactactggaaacggtagctaataccgcataacgtcgcaagaccaaagagggggaccttcgggcctcttgccatcagatgtgcccagatgggattagctagtaggtggggtaatggctcacctaggcgacgatccctagctggtctgagaggatgaccagccacactggaactgagacacggtccagactcctacgggaggcagcagtggggaatattgcacaatgggcgcaagcctgatgcagccatgccgcgtgtgtgaagaaggccttcgggttgtaaagcactttcagcgaggaggaaggtggtgagcttaatacgctcatcaattgacgttactcgcagaagaagcaccggctaactccgtgccagcagccgcggtaatacggagggtgcaagcgttaatcggaattactgggcgtaaagcgcacgcaggcggtttgttaagtcagatgtgaaatccccgggctcaacctgggaactgcatttgaaactggcaagctagagtctcgtagaggggggtagaattccaggtgtagcggtgaaatgcgtagagatctggaggaataccggtggcgaaggcggccccctggacgaagactgacgctcaggtgcgaaagcgtggggagcaaacaggattagataccctggtagtccacgctgtaaacgatgtcgatttggaggttgtgcccttgaggcgtggcttccggagctaacgcgttaaatcgaccgcctggggagtacggccgcaaggttaaaactcaaatgaattgacgggggcccgcacaagcggtggagcatgtggtttaattcgatgcaacgcgaagaaccttacctactcttgacatccagagaacttagcagagatgctttggtgccttcgggaactctgagacaggtgctgcatggctgtcgtcagctcgtgttgtgaaatgttgggttaagtcccgcaacgagcgcaacccttatcctttgttgccagcggttcggccgggaactcaaaggagactgccagtgataaactggaggaaggtggggatgacgtcaagtcatcatggcccttacgagtagggctacacacgtgctacaatggcatatacaaagagaagcgacctcgcgagagcaagcggacctcataaagtatgtcgtagtccggattggagtctgcaactcgactccatgaagtcggaatcgctagtaatcgtagatcagaatgctacggtgaatacgttcccgggccttgtacacaccgcccgtcacaccatgggagtgggttgcaaaagaagtaggtagcttaaccttcgggagggcgcttaccactttgtgattcatgactggggtgaagtcgtaacaaggtaaccgtaggggaacctgcggttggatcatgtggttacctaaagatattagttcgagtggcgtgctcacacagattgtctgatgaaaaagtaatgagcaaacaaaaccttgtggtataggtaagtgccgggagatttgtgactgtccagtgcagtgacaaacgacaatggcgctcgatttttcacgaaaaatctcacctttacccgaaattatcgaatcggtgattcgataagccaatttcgggtccccatcgtctagaggcctaggacactgccctttcacggctgtaacaggggttcgaatccccttggggacgccattccgataatgagtgaaagacattatcaccggttagcgataaccgaaaaaaatcttaaagatgacttgcgagtcatgtttaagatattgctctttaacaatctggaacaagctgaaaattgaaacatgacggctgaaatttatccctccgtagaagtactgggatgaagagtaacctgtcatagagtctctcaaatgtttgcagcgcgaacgatggaaacatcttcgggttgtgaggttaagtgactaagcgtacacggtggatgcctaggcagtcagaggcgatgaagggcgtgctaatctgcgaaaagcgtcggtaaggtgatatgaaccgttataaccggcgatacccgaatggggaaacccagtgtgtttcgacacactatcatgtcatgaatacatagtggcatgaggcgaaccgggggaactgaaacatctaagtaccccgaggaaaagaaatcaaccgagattcccccagtagcggcgagcgaacggggaggagcccagaacctgaatcggcttgtgtgttagtggaagcgtctggaaagtcgcgcagcaaagggtgatagccccgtacactaaaatgcacaggtcgtgagttcgatgagtagggcgggacacgtgacatcctgtctgaatatggggggaccatcctccaaggctaaatactcctgactgaccgatagtgaaccagtaccgtgagggaaaggcgaaaagaaccccggcgaggggagtgaaatagaacctgaaaccgtgtacgtacaagcagtgggagcaccttcgtggtgtgactgcgtaccttttgtataatgggtcagcgacttatattttgtagcaaggttaaccgtataggggagccgtagggaaaccgagtcttaactgggcgaatagttgcaaggtatagacccgaaacccggtgatctagccatgggcaggttgaaggttgggtaacactaactggaggaccgaaccgactaatgttgaaaaattagcggatgacttgtggctgggggtgaaaggccaatcaaaccgggagatagctggttctccccgaaagctatttaggtagcgcctcgtgaactcatcttcgggggtagagcactgtttcggctagggggccatcccggcttaccaaaccgatgcaaactccgaataccgaagaatgttatcacgggagacacacggcgggtgctaacgtccgtcgtgaagagggaaacaacccagaccgccagctaaggtcccaaagtcatggttaagtgggaaacgatgtgggaaggcatagacagccaggatgttggcttagaagcagccatcatttaaagaaagcgtaatagctcactggtcgagtcggcctgcgcggaagatgtaacggggctaaaccatgcaccgaagctgcggcagcgacgcttaggcgttgttgggtaggggagcgttctgtaagccgttgaaggtggcctgtgagggttgctggaggtatcagaagtgcgaatgctgacataagtaacgataaagcgggtgaaaagcccgctcgccggaagaccaagggttcctgtccaacgttaatcggggcagggtgagtcgacccctaaggcgaggctgaaaagcgtagtcgatgggaaacaggttaatattcctgtacttggtgttactgcgaaggggggacggagaaggctaggctagccgggcgacggttgtcccggtttaagcgtgtagggggtgtgacctggtaaatccggttgcatattaaccctgaggcgtgatgacgatgcactacggtgcagaagtagttgatgccctgcttccaggaaaatcctctaagcatcaggtaacattaaatcgtaccccaaaccgacacaggtggtcaggtagagaataccaaggcgcttgagagaactcgggtgaaggaactaggcaaaatggtgccgtaacttcgggagaaggcacgctggcatgtaggtgaagtccctcgcggatggagctgaagccagtcgaagataccagctggctgcaactgtttaataaaaacacagcactgtgcaaacacgaaagtggacgtatacggtgtgacgcctgcccggtgctggaaggttaattgatggggtcagccgcaaggcgaagctcttgatcgaagccccagtaaacggcggccgtaactataacggtcctaaggtagcgaaattccttgtcgggtaagttccgacctgcacgaatggcgtaatgatggccaggctgtctccacccgagactcagtgaaattgaactcgctgtgaagatgcagtgtacccgcggcaagacggaaagaccccgtgaacctttactatagcttgacactgaacattgagccttgatgtgtaggataggtgggaggctttgaagcgtggacgccagtctgcgtggagccatccttgaaataccaccctttaatgtttgatgttctaactcggccccgtaatccggggtgaggacagtgtctggtgggtagtttgactggggcggtctcctcccaaagagtaacggaggagcacgaaggttagctaatcacggtcggacatcgtgaggttagtgcaaaggcataagctagcttgactgcgagagtgacggctcgagcaggtacgaaagtaggtcttagtgatccggtggttctgaatggaagggccatcgctcaacggataaaaggtactccggggataacaggctgataccgcccaagagttcatatcgacggcggtgtttggcacctcgatgtcggctcatcacatcctggggctgaagtaggtcccaagggtatggctgttcgccatttaaagtggtacgcgagctgggtttagaacgtcgtgagacagttcggtccctatctgccgtgggcgttggaagattgagaggggttgctcctagtacgagaggaccggagtgaacgcaccactggtgttcgggttgtcatgccaatggcattgcccggtagctaagtgcggaaaagataagcgctgaaagcatctaagcgcgaaacttgcctcaagatgagtcttccctgggcctttaaggtccctgaaggaacgtttaagactaagacgttgataggctgggtgtgtaagtgcagcgatgcattgagctaaccagtactaatgatccgtgaggcttaaccttacaacaccgaaggtgtttttagagagattttcagcgaagttccgagattggttctgatggcttcacgggagtgaggcggttggaatgaaacagaatttgcctggcggcaatagcgcggtggtcccacctgaccccatgccgaactcagaagtgaaacgccgtagcgccgatggtagtgtggggtctccccatgcgagagtaggacactgccaggcatcaaataaacgttatcagtgtgacgactggtaatgcgcaaatcgcaaagcgcgaatttgccggcatcgaaagatgcaacgtaaaagaatcggtggagcggtagttcagttggttagaatacctgcctgtcacgcagggggtcgcgggttcgagccccgtccgttccgccacttaattgataagccctgagtctctgactcagggctttttcatatctatattttgcgattttcaggccggaattgtgcgcgccgggaaatgtgcgcggaacccctatttgtttatttttctaaatacattcaaatatgtatccgctcatgagacaataaccctgataaatgcttcaataatattgaaaaaggaagagtatgagtattcaacatttccgtgtcgcccttattcccttttttgcggcattttgccttcctgtttttgctcacccagaaacgctggtgaaagtaaaagatgctgaagatcagttgggtgcacgagtgggttacatcgaactggatctcaacagcggtaagatccttgagagttttcgccccgaagaacgttttccaatgatgagcacttttaaagttctgctatgtggcgcggtattatcccgtgttgacgccgggcaagagcaactcggtcgccgcatacactattctcagaatgacttggttgagtactcaccagtcacagaaaagcatcttacggatggcatgacagtaagagaattatgcagtgctgcaataaccatgagtgataacactgcggccaacttacttctgacaacgatcggaggaccgaaggagctaaccgcttttttgcacaacatgggggatcatgtaactcgccttgatcgttgggaaccggagctgaatgaagccataccaaacgacgagcgtgacaccacgatgcctgcagcaatggcaacaacgttgcgcaaactattaactggcgaactacttactctagcttcccggcaacaattaatagactggatggaggcggataaagttgcaggaccacttctgcgctcggcccttccggctagctggtttattgctgataaatctggagccggtgagcgtgggtctcgcggtatcattgcagcactggggccagatggtaagccctcccgtatcgtagttatctacacgacggggagtcaggcaactatggatgaacgaaatagacagatcgctgagataggtgcctcactgattaagcattggtaactgcagaccaagtttactcatatatactttagattgatttaaaacttcatttttaatttaaaaggatctaggtgaagatcctttttgataatctcatgaccaaaatcccttaacgtgagttttcgttccactgagcgtcagaccccgtagaaaagatcaaaggatcttcttgagatcctttttttctgcgcgtaatctgctgcttgcaaacaaaaaaaccaccgctaccagcggtggtttgtttgccggatcaagagctaccaactctttttccgaaggtaactggcttcagcagagcgcagataccaaatactgtccttctagtgtagccgtagttaggccaccacttcaagaactctgtagcaccgcctacatacctcgctctgctaatcctgttaccagtggctgctgccagtggcgataagtcgtgtcttaccgggttggactcaagacgatagttaccggataaggcgcagcggtcgggctgaacggggggttcgtgcacacagcccagcttggagcgaacgacctacaccgaactgagatacctacagcgtgagctatgagaaagcgccacgcttcccgaagggagaaaggcggacaggtatccggtaagcggcagggtcggaacaggagagcgcacgagggagcttccagggggaaacgcctggtatctttatagtcctgtcgggtttcgccacctctgacttgagcgtcgatttttgtgatgctcgtcaggggggcggagcctatggaaaaacgccagcaacgcggcctttttacggttcctggccttttgctgg

SEQ ID NO: 60 - DNA, 7956 bp, Artificial
  Synthetic
agacttagggaccctgcggccgccattaattcctaatttttgttgacactctatcattgatagagttattttaccactccctatcagtgatagagaaaagtgaaatgaatagaccggccgctgagaaaaagcgaagcggcacaaattatcagacaatctgtgtgggcactcacaggacactatcaaaaaaatatttgattttaaagtcttgaagagtgactaacacgttaattcatatatgaaagaatgtagtcagtttaattctttgagcatcaaacacttttaattgaagagtttgatcatggctcagattgaacgctggcggcaggcctaacacatgcaagtcgagcggtaacaggggaagcttgcttctcgctgacgagcggcggacgggtgagtaatgtatggggatctgcccgatagagggggataactactggaaacggtggctaataccgcataatctcttaggagcaaagcaggggaccttcgggccttgcgctgtcggatgaacccatatgggattagctagtaggtaaggtaatggcttacctaggcgacgatccctagctggtctgagaggatgatcagccacactgggactgagacacggcccagactcctacgggaggcagcagtggggaatattgcacaatgggcgcaagcctgatgcagccatgccgcgtgtatgaagaaggccctagggttgtaaagtactttcagtcgggaggaaggcgttgatgttaataccatcaacgattgacgttaccgacagaagaagcaccggctaactccgtgccagcagccgcggtaatacggagggtgcaagcgttaatcggaattactgggcgtaaagcgcacgcaggcggttaattaagttagatgtgaaatccccgggcttaacctgggaatggcatctaagactggttagctagagtcttgtagaggggggtagaattccatgtgtagcggtgaaatgcgtagagatgtggaggaataccggtggcgaaggcggccccctggacaaagactgacgctcaggtgcgaaagcgtggggagcaaacaggattagataccctggtagtccacgctgtaaacgatgtcgatttggaggttgttccctagaggagtggcttccggagctaacgcgttaaatcgaccgcctggggagtacggccgcaaggttaaaactcaaatgaattgacgggggcccgcacaagcggtggagcatgtggtttaattcgatgcaacgcgaagaaccttacctactcttgacatccagagaatttagcagagatgctttagtgccttcgggaactctgagacaggtgctgcatggctgtcgtcagctcgtgttgtgaaatgttgggttaagtcccgcaacgagcgcaacccttatcctttgttgccagcgattcggtcgggaactcaaaggagactgccggtgataaaccggaggaaggtggggatgacgtcaagtcatcatggcccttacgagtagggctacacacgtgctacaatggcgtatacaaagagaagcgacctcgcgagagcaagcggaactcataaagtacgtcgtagtccggattggagtctgcaactcgactccatgaagtcggaatcgctagtaatcgtagatcagaatgctacggtgaatacgttcccgggccttgtacacaccgcccgtcacaccatgggagtgggttgcaaaagaagtaggtagcttaaccttcgggagggcgcttaccactttgtgatccatgactggggtgaagtcgtaacaaggtaaccgtaggggaacctgcggttggatcacctccttacctaagagatacgtgttatgtgaagtgctcacacagattgtctgatgaagaacgagcagagataccggtataggcttgtagctcaggtggttagagcgcacccctgataagggtgaggtcggtggttcaagtccactcaggcctaccacttttcctttatgctgtgttgtgaagcaactcgtttacattaagtaaacttcgttactccacgccttgcctaaagaaaaagcttcttattataagaagaaaaaggagtggttatacgggtattaaaacattatggggctatagctcagctgggagagcgcctgccttgcacgcaggaggtcagcggttcgatcccgcttagctccaccataatctcttggatataaaacaatgattcagagtatattaggaatagtatactgtgaattattatgctctttaacaatctggaacaagctgaaaaattgaaaacaaatcaatatatcaccgaggtatattgatgagtctctcaaaatctcaaactttgaatgtgttttgacatcaaagtgggatgagcgagcaatttacagttcgaggcggacagcgcacagcaagcgcagcatacttaagtatgtgagcattgcgagcactgcccaacgaagaaatgtaatctgcgcagccatcaccacccagatagtctttgaaagagacactttcgggttgtgaggttaagcgaataagcgtacacggtggatgcctaggcaatcagaggcgatgaaggacgtgctaatctgcgaaaagcgtcggtaaggtgatatgaaccgttatacccgacgatatccgaatggggaaacccagtatccaatggatactatcattaactgaatccataggttaatgaggcgaaccgggagaactgaaacatctcagtaccccgaggaaaagaaatcaaccgagattcccctagtagcggcgagcgaacggggagcagcccagagtcttaatcaatagcagtgtcaggagaacggtctggaaagtccggcagtaaagggtgatagccccgtatctgaagatgctgttgttgtgaactcgacgagtagggcgggacacgtgttatcctgtctgaatatggggggaccatcctccaaggctaaatactcctgattgaccgatagtgaaccagtaccgtgagggaaaggcgaaaagaaccccggcgaggggagtgaaaaagaacctgaaaccgtgtacgtacaagcagtaggagccccatcactcaagtgcctcgcactgagtgatgcaataacatcaccgaaaatagcgccgaatttgctaacaaggttggtcgattttttcaagccgtcgcgcagtgtacctagaagtacacgagcaacggaagttaaaaaatcgggcaagattgaacgcaaaggcaagcgggacatttgaggatggggtgactgcgtaccttttgtataatgggtcagcgacttatattctgtagcaaggttaaccgtataggggagccgtagggaaaccgagtcttaactgggcgaatgagttgcagggtatagacccgaaacccggtgatctatccatgggcaggttgaaggttgggtaacactaactggaggaccgaaccgactaatgttgaaaaattagcggatgacttgtggatgggggtgaaaggccaatcaaaccgggagatagctggttctccccgaaagctatttaggtagcgcctcgtgaactcatcttcgggggtagagcactgtttcgactagggggtcatcccgacttaccaactcgatgcaaactgcgaataccgaagaatgttatcacgggagacacacggcgggtgctaacgtccgtcgtgaagagggaaacaacccagaccgccagctaaggtcccaaagtcatggttaagtgggaaacgaagtgggaaggctcagacagccaggatgttggcttagaagcagccatcatttaaagaaagcgtaatagctcactggtcgagtcggcccgcgcggaagatgtaacggggctaaaccatgcaccgaagctgcggcagcgaacgtatcacttaaatttgtttgagtgaataacgattgacggaacgaagtgacgtcaatgcgttaatgaaagtcgaggcgaaagcacgacaaagcgaatttaaggatacgttcgttgggtaggggagcgttctgtaagcctgcgaaggtgtactgtgaggtatgctggaggtatcagaagtgcgaatgctgacataagtaacgataatgcgggtgaaaaacccgcacgccggaagaccaagggttcctgtccaacgttaatcggggcagggtgagtcgacccctaaggcgaggctgaaaagcgtagtcgatgggaaacgggttaatattcccgtactggtggtaactgcgatgggggaacggagaaggctaggttgtccgggcgacggtcgtcccggttcaagcaggtaggcagagtgattaggcaaatccggtcacttaatgctgagatgtgatgacgaaccaccaaggtggtgaagcaattgatgccccgcttccaggaaaagcctctaagcttcaggttaccaacaatcgtaccccaaaccgacacaggtggtcaggtagagaatactcaggcgcttgagagaactcgggtgaaggaactaggcaaaatggtgccgtaacttcgggagaaggcacgctggcggtaggtaaagtcccttgcggacggcgctgaagccagtcgaagataccagctggctgcaactgtttattaaaaacacagcactgtgcaaacacgaaagtggacgtatacggtgtgacgcctgcccggtgctggaaggttaattgatggggtcagccgtaaggcgaagctcctgatcgaagccccagtaaacggcggccgtaactataacggtcctaaggtagcgaaattccttgtcgggtaagttccgacctgcacgaatggcgtaatgatggccaggctgtctccacccgagactcagtgaaattgaactcgctgtgaagatgcagtgtacccgcggcaagacggaaagaccccgtgaacctttactatagcttgacactgaacattgagccttgatgtgtaggataggtgggaggctttgaagtgtggacgccagtctgcatggagccaaccttgaaataccaccctttaacgtttgatgttctaacctaggcccataaactgggtcggggaccgtgtctggtgggtagtttgactggggcggtctcctcctaaagagtaacggaggagcacgaaggttggctaagcatggtcggacatcatgcggttagtgcaaaggcataagccagcttgactgcgagagtgacggctcgagcaggtacgaaagtaggtcttagtgatccggtggttctgaatggaagggccatcgctcaacggataaaaggtactccggggataacaggctgataccgcccaagagttcatatcgacggcggtgtttggcacctcgatgtcggctcatcacatcctggggctgaagtaggtcccaagggtatggctgttcgccatttaaagtggtacgcgagctgggtttagaacgtcgtgagacagttcggtccctatctgccgtgggcgttggaagattgagaggggttgctcctagtacgagaggaccggagtgaacgcaccactggtgttcgggttgtcatgccaatggcattgcccggtagctaagtgcggaagagataaccgctgaaagcatctaagcgggaaacttgcctcgagatgagtcttccctgtcgctttaagcgacctaaaggaacgtttaagactaagacgttgataggctgggtgtgtaagcgtagcgatacgttgagctaaccagtactaatgaaccgtgaggcttaacctgacaacaccgaaggtgttttgtcagagagacgaaacgataaagtcagcttgttcaagattgaattactggcgacttaccgaaaggaaggaagcgagtaatagacaagaatttgcttggcggccatagcgcggtggtcccacctgatcccatgccgaactcagaagtgaaacgccgtagcgccgatggtagtgtggggtctccccatgtgagagtagggaactgccaagcattaaataagacgagaaagccaacccaatgggttggcttttttgcgtttgatattttttattctcaattttatcctttaactaaggaaaagagttatttcaattgctgatagagtaaactgccagcagcggctcctgccacatcataagcaaaatcatgccagctccatcccgtaccttgtggtcgactatcataaagctctttagcgacgcctaaacttattgaaaaagataagccaataactaatcgcgcgccgggaaatgtgcgcggaacccctatttgtttatttttctaaatacattcaaatatgtatccgctcatgagacaataaccctgataaatgcttcaataatattgaaaaaggaagagtatgagtattcaacatttccgtgtcgcccttattcccttttttgcggcattttgccttcctgtttttgctcacccagaaacgctggtgaaagtaaaagatgctgaagatcagttgggtgcacgagtgggttacatcgaactggatctcaacagcggtaagatccttgagagttttcgccccgaagaacgttttccaatgatgagcacttttaaagttctgctatgtggcgcggtattatcccgtgttgacgccgggcaagagcaactcggtcgccgcatacactattctcagaatgacttggttgagtactcaccagtcacagaaaagcatcttacggatggcatgacagtaagagaattatgcagtgctgcaataaccatgagtgataacactgcggccaacttacttctgacaacgatcggaggaccgaaggagctaaccgcttttttgcacaacatgggggatcatgtaactcgccttgatcgttgggaaccggagctgaatgaagccataccaaacgacgagcgtgacaccacgatgcctgcagcaatggcaacaacgttgcgcaaactattaactggcgaactacttactctagcttcccggcaacaattaatagactggatggaggcggataaagttgcaggaccacttctgcgctcggcccttccggctagctggtttattgctgataaatctggagccggtgagcgtgggtctcgcggtatcattgcagcactggggccagatggtaagccctcccgtatcgtagttatctacacgacggggagtcaggcaactatggatgaacgaaatagacagatcgctgagataggtgcctcactgattaagcattggtaactgcagaccaagtttactcatatatactttagattgatttaaaacttcatttttaatttaaaaggatctaggtgaagatcctttttgataatctcatgaccaaaatcccttaacgtgagttttcgttccactgagcgtcagaccccgtagaaaagatcaaaggatcttcttgagatcctttttttctgcgcgtaatctgctgcttgcaaacaaaaaaaccaccgctaccagcggtggtttgtttgccggatcaagagctaccaactctttttccgaaggtaactggcttcagcagagcgcagataccaaatactgtccttctagtgtagccgtagttaggccaccacttcaagaactctgtagcaccgcctacatacctcgctctgctaatcctgttaccagtggctgctgccagtggcgataagtcgtgtcttaccgggttggactcaagacgatagttaccggataaggcgcagcggtcgggctgaacggggggttcgtgcacacagcccagcttggagcgaacgacctacaccgaactgagatacctacagcgtgagctatgagaaagcgccacgcttcccgaagggagaaaggcggacaggtatccggtaagcggcagggtcggaacaggagagcgcacgagggagcttccagggggaaacgcctggtatctttatagtcctgtcgggtttcgccacctctgacttgagcgtcgatttttgtgatgctcgtcaggggggcggagcctatggaaaaacgccagcaacgcggcctttttacggttcctggccttttgctgg

SEQ ID NO: 61 - DNA, 7690 bp, Artificial
  Synthetic
agacttagggaccctgcggccgccattaattcctaatttttgttgacactctatcattgatagagttattttaccactccctatcagtgatagagaaaagtgaaatgaatagaccggccgctgagaaaaagcgaagcggcactgctctttaacaatttatcagacaatctgtgtgggcactcgaagatacggattcttaacgtcgcaagacgaaaaatgaataccaagtctcaagagtgaacacgtaattcattacgaagtttaattctttgagcgtcaaactttttaattgaagagtttgatcatggctcagattgaacgctggcggcaggcctaacacatgcaagtcgagcggtaacaggggaagcttgcttctcgctgacgagcggcggacgggtgagtaatgtatggggatctgcccgatagagggggataactactggaaacggtggctaataccgcataatctcttaggagcaaagcaggggaccttcgggccttgcgctgtcggatgaacccatatgggattagctagtaggtaaggtaatggcttacctaggcgacgatccctagctggtctgagaggatgatcagccacactgggactgagacacggcccagactcctacgggaggcagcagtggggaatattgcacaatgggcgcaagcctgatgcagccatgccgcgtgtatgaagaaggccctagggttgtaaagtactttcagtcgggaggaaggcgttgatgttaataccatcaacgattgacgttaccgacagaagaagcaccggctaactccgtgccagcagccgcggtaatacggagggtgcaagcgttaatcggaattactgggcgtaaagcgcacgcaggcggttaattaagttagatgtgaaatccccgggcttaacctgggaatggcatctaagactggttagctagagtcttgtagaggggggtagaattccatgtgtagcggtgaaatgcgtagagatgtggaggaataccggtggcgaaggcggccccctggacaaagactgacgctcaggtgcgaaagcgtggggagcaaacaggattagataccctggtagtccacgctgtaaacgatgtcgatttggaggttgttccctagaggagtggcttccggagctaacgcgttaaatcgaccgcctggggagtacggccgcaaggttaaaactcaaatgaattgacgggggcccgcacaagcggtggagcatgtggtttaattcgatgcaacgcgaagaaccttacctactcttgacatccagagaatttagcagagatgctttagtgccttcgggaactctgagacaggtgctgcatggctgtcgtcagctcgtgttgtgaaatgttgggttaagtcccgcaacgagcgcaacccttatcctttgttgccagcgattcggtcgggaactcaaaggagactgccggtgataaaccggaggaaggtggggatgacgtcaagtcatcatggcccttacgagtagggctacacacgtgctacaatggcgtatacaaagagaagcgacctcgcgagagcaagcggaactcataaagtacgtcgtagtccggattggagtctgcaactcgactccatgaagtcggaatcgctagtaatcgtagatcagaatgctacggtgaatacgttcccgggccttgtacacaccgcccgtcacaccatgggagtgggttgcaaaagaagtaggtagcttaaccttcgggagggcgcttaccactttgtgatccatgactggggtgaagtcgtaacaaggtaaccgtaggggaacctgcggttggatcacctccttaccttaaagaagcgtactttgtagtgctcacacagattgtctgatagaaagtgaaaagcaaggcgtttacgcgttgggagtgaggctgaagagaataaggccgttcgctttctattaatgaaagctcaccctacacgaaaatatcacgcaacgcgtgataagcaattttcgtgtccccttcgtctagaggcccaggacaccgccctttcacggcggtaacaggggttcgaatcccctaggggacgccacttgctggtttgtgagtgaaagtcgccgaccttaatatctcaaaactcatcttcgggtgatgtttgagatatttgctctttaaaaatctggatcaagctgaaaattgaaacactgaacaacgagagttgttcgtgagtctctcaaattttcgcaacacgatgatgaatcgaaagaaacatcttcgggttgtgaggttaagcgaataagcgtacacggtggatgcctaggcaatcagaggcgatgaaggacgtgctaatctgcgaaaagcgtcggtaaggtgatatgaaccgttatacccgacgatatccgaatggggaaacccagtatccaatggatactatcattaactgaatccataggttaatgaggcgaaccgggagaactgaaacatctcagtaccccgaggaaaagaaatcaaccgagattcccctagtagcggcgagcgaacggggagcagcccagagtcttaatcaatagcagtgtcaggagaacggtctggaaagtccggcagtaaagggtgatagccccgtatctgaagatgctgttgttgtgaactcgacgagtagggcgggacacgtgttatcctgtctgaatatggggggaccatcctccaaggctaaatactcctgattgaccgatagtgaaccagtaccgtgagggaaaggcgaaaagaaccccggcgaggggagtgaaaaagaacctgaaaccgtgtacgtacaagcagtaggagccccatcactcaagtgcctcgcactgagtgatgcaataacatcaccgaaaatagcgccgaatttgctaacaaggttggtcgattttttcaagccgtcgcgcagtgtacctagaagtacacgagcaacggaagttaaaaaatcgggcaagattgaacgcaaaggcaagcgggacatttgaggatggggtgactgcgtaccttttgtataatgggtcagcgacttatattctgtagcaaggttaaccgtataggggagccgtagggaaaccgagtcttaactgggcgaatgagttgcagggtatagacccgaaacccggtgatctatccatgggcaggttgaaggttgggtaacactaactggaggaccgaaccgactaatgttgaaaaattagcggatgacttgtggatgggggtgaaaggccaatcaaaccgggagatagctggttctccccgaaagctatttaggtagcgcctcgtgaactcatcttcgggggtagagcactgtttcgactagggggtcatcccgacttaccaactcgatgcaaactgcgaataccgaagaatgttatcacgggagacacacggcgggtgctaacgtccgtcgtgaagagggaaacaacccagaccgccagctaaggtcccaaagtcatggttaagtgggaaacgaagtgggaaggctcagacagccaggatgttggcttagaagcagccatcatttaaagaaagcgtaatagctcactggtcgagtcggcccgcgcggaagatgtaacggggctaaaccatgcaccgaagctgcggcagcgaacgtatcacttaaatttgtttgagtgaataacgattgacggaacgaagtgacgtcaatgcgttaatgaaagtcgaggcgaaagcacgacaaagcgaatttaaggatacgttcgttgggtaggggagcgttctgtaagcctgcgaaggtgtactgtgaggtatgctggaggtatcagaagtgcgaatgctgacataagtaacgataatgcgggtgaaaaacccgcacgccggaagaccaagggttcctgtccaacgttaatcggggcagggtgagtcgacccctaaggcgaggctgaaaagcgtagtcgatgggaaacgggttaatattcccgtactggtggtaactgcgatgggggaacggagaaggctaggttgtccgggcgacggtcgtcccggttcaagcaggtaggcagagtgattaggcaaatccggtcacttaatgctgagatgtgatgacgaaccaccaaggtggtgaagcaattgatgccccgcttccaggaaaagcctctaagcttcaggttaccaacaatcgtaccccaaaccgacacaggtggtcaggtagagaatactcaggcgcttgagagaactcgggtgaaggaactaggcaaaatggtgccgtaacttcgggagaaggcacgctggcggtaggtaaagtcccttgcggacggcgctgaagccagtcgaagataccagctggctgcaactgtttattaaaaacacagcactgtgcaaacacgaaagtggacgtatacggtgtgacgcctgcccggtgctggaaggttaattgatggggtcagccgtaaggcgaagctcctgatcgaagccccagtaaacggcggccgtaactataacggtcctaaggtagcgaaattccttgtcgggtaagttccgacctgcacgaatggcgtaatgatggccaggctgtctccacccgagactcagtgaaattgaactcgctgtgaagatgcagtgtacccgcggcaagacggaaagaccccgtgaacctttactatagcttgacactgaacattgagccttgatgtgtaggataggtgggaggctttgaagtgtggacgccagtctgcatggagccaaccttgaaataccaccctttaacgtttgatgttctaacctaggcccataaactgggtcggggaccgtgtctggtgggtagtttgactggggcggtctcctcctaaagagtaacggaggagcacgaaggttggctaagcatggtcggacatcatgcggttagtgcaaaggcataagccagcttgactgcgagagtgacggctcgagcaggtacgaaagtaggtcttagtgatccggtggttctgaatggaagggccatcgctcaacggataaaaggtactccggggataacaggctgataccgcccaagagttcatatcgacggcggtgtttggcacctcgatgtcggctcatcacatcctggggctgaagtaggtcccaagggtatggctgttcgccatttaaagtggtacgcgagctgggtttagaacgtcgtgagacagttcggtccctatctgccgtgggcgttggaagattgagaggggttgctcctagtacgagaggaccggagtgaacgcaccactggtgttcgggttgtcatgccaatggcattgcccggtagctaagtgcggaagagataaccgctgaaagcatctaagcgggaaacttgcctcgagatgagtcttccctgtcgctttaagcgacctaaaggaacgtttaagactaagacgttgataggctgggtgtgtaagcgtagcgatacgttgagctaaccagtactaatgaaccgtgaggcttaacctgacaacgccgaagctgttttggcggatgagagaagattttcagcctgatacagattaaatcagaacgcagaagcggtctgataaaacagaatttgcttggcggccatagcgcggtggtcccacctgatcccatgccgaactcagaagtgaaacgccgtagcgccgatggtagtgtggggtctccccatgtgagagtagggaactgccaagcatcaaataaaacgaaaggctcagtcgaaagactgggcctttcgttttatctgttgtttgtcggtgaacgctctcctgagtaggacaaatccgccgggagcggatttgaacgttgcgaagcaacggcccggagggtggcgggcaggacgcccgccataaactgccaggcatcaaattaagcagaaggccatcctgacggatggcctttttgcgtttctacaaactcttcctgtcgtcatatctacaagccggcgcgccgggaaatgtgcgcggaacccctatttgtttatttttctaaatacattcaaatatgtatccgctcatgagacaataaccctgataaatgcttcaataatattgaaaaaggaagagtatgagtattcaacatttccgtgtcgcccttattcccttttttgcggcattttgccttcctgtttttgctcacccagaaacgctggtgaaagtaaaagatgctgaagatcagttgggtgcacgagtgggttacatcgaactggatctcaacagcggtaagatccttgagagttttcgccccgaagaacgttttccaatgatgagcacttttaaagttctgctatgtggcgcggtattatcccgtgttgacgccgggcaagagcaactcggtcgccgcatacactattctcagaatgacttggttgagtactcaccagtcacagaaaagcatcttacggatggcatgacagtaagagaattatgcagtgctgcaataaccatgagtgataacactgcggccaacttacttctgacaacgatcggaggaccgaaggagctaaccgcttttttgcacaacatgggggatcatgtaactcgccttgatcgttgggaaccggagctgaatgaagccataccaaacgacgagcgtgacaccacgatgcctgcagcaatggcaacaacgttgcgcaaactattaactggcgaactacttactctagcttcccggcaacaattaatagactggatggaggcggataaagttgcaggaccacttctgcgctcggcccttccggctagctggtttattgctgataaatctggagccggtgagcgtgggtctcgcggtatcattgcagcactggggccagatggtaagccctcccgtatcgtagttatctacacgacggggagtcaggcaactatggatgaacgaaatagacagatcgctgagataggtgcctcactgattaagcattggtaactgcagaccaagtttactcatatatactttagattgatttaaaacttcatttttaatttaaaaggatctaggtgaagatcctttttgataatctcatgaccaaaatcccttaacgtgagttttcgttccactgagcgtcagaccccgtagaaaagatcaaaggatcttcttgagatcctttttttctgcgcgtaatctgctgcttgcaaacaaaaaaaccaccgctaccagcggtggtttgtttgccggatcaagagctaccaactctttttccgaaggtaactggcttcagcagagcgcagataccaaatactgtccttctagtgtagccgtagttaggccaccacttcaagaactctgtagcaccgcctacatacctcgctctgctaatcctgttaccagtggctgctgccagtggcgataagtcgtgtcttaccgggttggactcaagacgatagttaccggataaggcgcagcggtcgggctgaacggggggttcgtgcacacagcccagcttggagcgaacgacctacaccgaactgagatacctacagcgtgagctatgagaaagcgccacgcttcccgaagggagaaaggcggacaggtatccggtaagcggcagggtcggaacaggagagcgcacgagggagcttccagggggaaacgcctggtatctttatagtcctgtcgggtttcgccacctctgacttgagcgtcgatttttgtgatgctcgtcaggggggcggagcctatggaaaaacgccagcaacgcggcctttttacggttcctggccttttgctgg

SEQ ID NO: 62 - DNA, 7956 bp, Artificial
  Synthetic
agacttagggaccctgcggccgccattaattcctaatttttgttgacactctatcattgatagagttattttaccactccctatcagtgatagagaaaagtgaaatgaatagaccggccgctgagaaaaagcgaagcggcacaaattatcagacaatctgtgtgggcactcacaggacactatcaaaaaaatatttgattttaaagtcttgaagagtgactaacacgttaattcatatatgaaagaatgtagtcagtttaattctttgagcatcaaacacttttaattgaagagtttgatcatggctcagattgaacgctggcggcaggcctaacacatgcaagtcgagcggtaacaggggaagcttgcttctcgctgacgagcggcggacgggtgagtaatgtatggggatctgcccgatagagggggataactactggaaacggtggctaataccgcataatctcttaggagcaaagcaggggaccttcgggccttgcgctgtcggatgaacccatatgggattagctagtaggtaaggtaatggcttacctaggcgacgatccctagctggtctgagaggatgatcagccacactgggactgagacacggcccagactcctacgggaggcagcagtggggaatattgcacaatgggcgcaagcctgatgcagccatgccgcgtgtatgaagaaggccctagggttgtaaagtactttcagtcgggaggaaggcgttgatgttaataccatcaacgattgacgttaccgacagaagaagcaccggctaactccgtgccagcagccgcggtaatacggagggtgcaagcgttaatcggaattactgggcgtaaagcgcacgcaggcggttaattaagttagatgtgaaatccccgggcttaacctgggaatggcatctaagactggttagctagagtcttgtagaggggggtagaattccatgtgtagcggtgaaatgcgtagagatgtggaggaataccggtggcgaaggcggccccctggacaaagactgacgctcaggtgcgaaagcgtggggagcaaacaggattagataccctggtagtccacgctgtaaacgatgtcgatttggaggttgttccctagaggagtggcttccggagctaacgcgttaaatcgaccgcctggggagtacggccgcaaggttaaaactcaaatgaattgacgggggcccgcacaagcggtggagcatgtggtttaattcgatgcaacgcgaagaaccttacctactcttgacatccagagaatttagcagagatgctttagtgccttcgggaactctgagacaggtgctgcatggctgtcgtcagctcgtgttgtgaaatgttgggttaagtcccgcaacgagcgcaacccttatcctttgttgccagcgattcggtcgggaactcaaaggagactgccggtgataaaccggaggaaggtggggatgacgtcaagtcatcatggcccttacgagtagggctacacacgtgctacaatggcgtatacaaagagaagcgacctcgcgagagcaagcggaactcataaagtacgtcgtagtccggattggagtctgcaactcgactccatgaagtcggaatcgctagtaatcgtagatcagaatgctacggtgaatacgttcccgggccttgtacacaccgcccgtcacaccatgggagtgggttgcaaaagaagtaggtagcttaaccttcgggagggcgcttaccactttgtgatccatgactggggtgaagtcgtaacaaggtaaccgtaggggaacctgcggttggatcatgtggttacctaagagatacgtgttatgtgaagtgctcacacagattgtctgatgaagaacgagcagagataccggtataggcttgtagctcaggtggttagagcgcacccctgataagggtgaggtcggtggttcaagtccactcaggcctaccacttttcctttatgctgtgttgtgaagcaactcgtttacattaagtaaacttcgttactccacgccttgcctaaagaaaaagcttcttattataagaagaaaaaggagtggttatacgggtattaaaacattatggggctatagctcagctgggagagcgcctgccttgcacgcaggaggtcagcggttcgatcccgcttagctccaccataatctcttggatataaaacaatgattcagagtatattaggaatagtatactgtgaattattatgctctttaacaatctggaacaagctgaaaaattgaaaacaaatcaatatatcaccgaggtatattgatgagtctctcaaaatctcaaactttgaatgtgttttgacatcaaagtgggatgagcgagcaatttacagttcgaggcggacagcgcacagcaagcgcagcatacttaagtatgtgagcattgcgagcactgcccaacgaagaaatgtaatctgcgcagccatcaccacccagatagtctttgaaagagacactttcgggttgtgaggttaagcgaataagcgtacacggtggatgcctaggcaatcagaggcgatgaaggacgtgctaatctgcgaaaagcgtcggtaaggtgatatgaaccgttatacccgacgatatccgaatggggaaacccagtatccaatggatactatcattaactgaatccataggttaatgaggcgaaccgggagaactgaaacatctcagtaccccgaggaaaagaaatcaaccgagattcccctagtagcggcgagcgaacggggagcagcccagagtcttaatcaatagcagtgtcaggagaacggtctggaaagtccggcagtaaagggtgatagccccgtatctgaagatgctgttgttgtgaactcgacgagtagggcgggacacgtgttatcctgtctgaatatggggggaccatcctccaaggctaaatactcctgattgaccgatagtgaaccagtaccgtgagggaaaggcgaaaagaaccccggcgaggggagtgaaaaagaacctgaaaccgtgtacgtacaagcagtaggagccccatcactcaagtgcctcgcactgagtgatgcaataacatcaccgaaaatagcgccgaatttgctaacaaggttggtcgattttttcaagccgtcgcgcagtgtacctagaagtacacgagcaacggaagttaaaaaatcgggcaagattgaacgcaaaggcaagcgggacatttgaggatggggtgactgcgtaccttttgtataatgggtcagcgacttatattctgtagcaaggttaaccgtataggggagccgtagggaaaccgagtcttaactgggcgaatgagttgcagggtatagacccgaaacccggtgatctatccatgggcaggttgaaggttgggtaacactaactggaggaccgaaccgactaatgttgaaaaattagcggatgacttgtggatgggggtgaaaggccaatcaaaccgggagatagctggttctccccgaaagctatttaggtagcgcctcgtgaactcatcttcgggggtagagcactgtttcgactagggggtcatcccgacttaccaactcgatgcaaactgcgaataccgaagaatgttatcacgggagacacacggcgggtgctaacgtccgtcgtgaagagggaaacaacccagaccgccagctaaggtcccaaagtcatggttaagtgggaaacgaagtgggaaggctcagacagccaggatgttggcttagaagcagccatcatttaaagaaagcgtaatagctcactggtcgagtcggcccgcgcggaagatgtaacggggctaaaccatgcaccgaagctgcggcagcgaacgtatcacttaaatttgtttgagtgaataacgattgacggaacgaagtgacgtcaatgcgttaatgaaagtcgaggcgaaagcacgacaaagcgaatttaaggatacgttcgttgggtaggggagcgttctgtaagcctgcgaaggtgtactgtgaggtatgctggaggtatcagaagtgcgaatgctgacataagtaacgataatgcgggtgaaaaacccgcacgccggaagaccaagggttcctgtccaacgttaatcggggcagggtgagtcgacccctaaggcgaggctgaaaagcgtagtcgatgggaaacgggttaatattcccgtactggtggtaactgcgatgggggaacggagaaggctaggttgtccgggcgacggtcgtcccggttcaagcaggtaggcagagtgattaggcaaatccggtcacttaatgctgagatgtgatgacgaaccaccaaggtggtgaagcaattgatgccccgcttccaggaaaagcctctaagcttcaggttaccaacaatcgtaccccaaaccgacacaggtggtcaggtagagaatactcaggcgcttgagagaactcgggtgaaggaactaggcaaaatggtgccgtaacttcgggagaaggcacgctggcggtaggtaaagtcccttgcggacggcgctgaagccagtcgaagataccagctggctgcaactgtttattaaaaacacagcactgtgcaaacacgaaagtggacgtatacggtgtgacgcctgcccggtgctggaaggttaattgatggggtcagccgtaaggcgaagctcctgatcgaagccccagtaaacggcggccgtaactataacggtcctaaggtagcgaaattccttgtcgggtaagttccgacctgcacgaatggcgtaatgatggccaggctgtctccacccgagactcagtgaaattgaactcgctgtgaagatgcagtgtacccgcggcaagacggaaagaccccgtgaacctttactatagcttgacactgaacattgagccttgatgtgtaggataggtgggaggctttgaagtgtggacgccagtctgcatggagccaaccttgaaataccaccctttaacgtttgatgttctaacctaggcccataaactgggtcggggaccgtgtctggtgggtagtttgactggggcggtctcctcctaaagagtaacggaggagcacgaaggttggctaagcatggtcggacatcatgcggttagtgcaaaggcataagccagcttgactgcgagagtgacggctcgagcaggtacgaaagtaggtcttagtgatccggtggttctgaatggaagggccatcgctcaacggataaaaggtactccggggataacaggctgataccgcccaagagttcatatcgacggcggtgtttggcacctcgatgtcggctcatcacatcctggggctgaagtaggtcccaagggtatggctgttcgccatttaaagtggtacgcgagctgggtttagaacgtcgtgagacagttcggtccctatctgccgtgggcgttggaagattgagaggggttgctcctagtacgagaggaccggagtgaacgcaccactggtgttcgggttgtcatgccaatggcattgcccggtagctaagtgcggaagagataaccgctgaaagcatctaagcgggaaacttgcctcgagatgagtcttccctgtcgctttaagcgacctaaaggaacgtttaagactaagacgttgataggctgggtgtgtaagcgtagcgatacgttgagctaaccagtactaatgaaccgtgaggcttaacctgacaacaccgaaggtgttttgtcagagagacgaaacgataaagtcagcttgttcaagattgaattactggcgacttaccgaaaggaaggaagcgagtaatagacaagaatttgcttggcggccatagcgcggtggtcccacctgatcccatgccgaactcagaagtgaaacgccgtagcgccgatggtagtgtggggtctccccatgtgagagtagggaactgccaagcattaaataagacgagaaagccaacccaatgggttggcttttttgcgtttgatattttttattctcaattttatcctttaactaaggaaaagagttatttcaattgctgatagagtaaactgccagcagcggctcctgccacatcataagcaaaatcatgccagctccatcccgtaccttgtggtcgactatcataaagctctttagcgacgcctaaacttattgaaaaagataagccaataactaatcgcgcgccgggaaatgtgcgcggaacccctatttgtttatttttctaaatacattcaaatatgtatccgctcatgagacaataaccctgataaatgcttcaataatattgaaaaaggaagagtatgagtattcaacatttccgtgtcgcccttattcccttttttgcggcattttgccttcctgtttttgctcacccagaaacgctggtgaaagtaaaagatgctgaagatcagttgggtgcacgagtgggttacatcgaactggatctcaacagcggtaagatccttgagagttttcgccccgaagaacgttttccaatgatgagcacttttaaagttctgctatgtggcgcggtattatcccgtgttgacgccgggcaagagcaactcggtcgccgcatacactattctcagaatgacttggttgagtactcaccagtcacagaaaagcatcttacggatggcatgacagtaagagaattatgcagtgctgcaataaccatgagtgataacactgcggccaacttacttctgacaacgatcggaggaccgaaggagctaaccgcttttttgcacaacatgggggatcatgtaactcgccttgatcgttgggaaccggagctgaatgaagccataccaaacgacgagcgtgacaccacgatgcctgcagcaatggcaacaacgttgcgcaaactattaactggcgaactacttactctagcttcccggcaacaattaatagactggatggaggcggataaagttgcaggaccacttctgcgctcggcccttccggctagctggtttattgctgataaatctggagccggtgagcgtgggtctcgcggtatcattgcagcactggggccagatggtaagccctcccgtatcgtagttatctacacgacggggagtcaggcaactatggatgaacgaaatagacagatcgctgagataggtgcctcactgattaagcattggtaactgcagaccaagtttactcatatatactttagattgatttaaaacttcatttttaatttaaaaggatctaggtgaagatcctttttgataatctcatgaccaaaatcccttaacgtgagttttcgttccactgagcgtcagaccccgtagaaaagatcaaaggatcttcttgagatcctttttttctgcgcgtaatctgctgcttgcaaacaaaaaaaccaccgctaccagcggtggtttgtttgccggatcaagagctaccaactctttttccgaaggtaactggcttcagcagagcgcagataccaaatactgtccttctagtgtagccgtagttaggccaccacttcaagaactctgtagcaccgcctacatacctcgctctgctaatcctgttaccagtggctgctgccagtggcgataagtcgtgtcttaccgggttggactcaagacgatagttaccggataaggcgcagcggtcgggctgaacggggggttcgtgcacacagcccagcttggagcgaacgacctacaccgaactgagatacctacagcgtgagctatgagaaagcgccacgcttcccgaagggagaaaggcggacaggtatccggtaagcggcagggtcggaacaggagagcgcacgagggagcttccagggggaaacgcctggtatctttatagtcctgtcgggtttcgccacctctgacttgagcgtcgatttttgtgatgctcgtcaggggggcggagcctatggaaaaacgccagcaacgcggcctttttacggttcctggccttttgctgg

SEQ ID NO: 63 - DNA, 7690 bp, Artificial
  Synthetic
agacttagggaccctgcggccgccattaattcctaatttttgttgacactctatcattgatagagttattttaccactccctatcagtgatagagaaaagtgaaatgaatagaccggccgctgagaaaaagcgaagcggcactgctctttaacaatttatcagacaatctgtgtgggcactcgaagatacggattcttaacgtcgcaagacgaaaaatgaataccaagtctcaagagtgaacacgtaattcattacgaagtttaattctttgagcgtcaaactttttaattgaagagtttgatcatggctcagattgaacgctggcggcaggcctaacacatgcaagtcgagcggtaacaggggaagcttgcttctcgctgacgagcggcggacgggtgagtaatgtatggggatctgcccgatagagggggataactactggaaacggtggctaataccgcataatctcttaggagcaaagcaggggaccttcgggccttgcgctgtcggatgaacccatatgggattagctagtaggtaaggtaatggcttacctaggcgacgatccctagctggtctgagaggatgatcagccacactgggactgagacacggcccagactcctacgggaggcagcagtggggaatattgcacaatgggcgcaagcctgatgcagccatgccgcgtgtatgaagaaggccctagggttgtaaagtactttcagtcgggaggaaggcgttgatgttaataccatcaacgattgacgttaccgacagaagaagcaccggctaactccgtgccagcagccgcggtaatacggagggtgcaagcgttaatcggaattactgggcgtaaagcgcacgcaggcggttaattaagttagatgtgaaatccccgggcttaacctgggaatggcatctaagactggttagctagagtcttgtagaggggggtagaattccatgtgtagcggtgaaatgcgtagagatgtggaggaataccggtggcgaaggcggccccctggacaaagactgacgctcaggtgcgaaagcgtggggagcaaacaggattagataccctggtagtccacgctgtaaacgatgtcgatttggaggttgttccctagaggagtggcttccggagctaacgcgttaaatcgaccgcctggggagtacggccgcaaggttaaaactcaaatgaattgacgggggcccgcacaagcggtggagcatgtggtttaattcgatgcaacgcgaagaaccttacctactcttgacatccagagaatttagcagagatgctttagtgccttcgggaactctgagacaggtgctgcatggctgtcgtcagctcgtgttgtgaaatgttgggttaagtcccgcaacgagcgcaacccttatcctttgttgccagcgattcggtcgggaactcaaaggagactgccggtgataaaccggaggaaggtggggatgacgtcaagtcatcatggcccttacgagtagggctacacacgtgctacaatggcgtatacaaagagaagcgacctcgcgagagcaagcggaactcataaagtacgtcgtagtccggattggagtctgcaactcgactccatgaagtcggaatcgctagtaatcgtagatcagaatgctacggtgaatacgttcccgggccttgtacacaccgcccgtcacaccatgggagtgggttgcaaaagaagtaggtagcttaaccttcgggagggcgcttaccactttgtgatccatgactggggtgaagtcgtaacaaggtaaccgtaggggaacctgcggttggatcatgtggttaccttaaagaagcgtactttgtagtgctcacacagattgtctgatagaaagtgaaaagcaaggcgtttacgcgttgggagtgaggctgaagagaataaggccgttcgctttctattaatgaaagctcaccctacacgaaaatatcacgcaacgcgtgataagcaattttcgtgtccccttcgtctagaggcccaggacaccgccctttcacggcggtaacaggggttcgaatcccctaggggacgccacttgctggtttgtgagtgaaagtcgccgaccttaatatctcaaaactcatcttcgggtgatgtttgagatatttgctctttaaaaatctggatcaagctgaaaattgaaacactgaacaacgagagttgttcgtgagtctctcaaattttcgcaacacgatgatgaatcgaaagaaacatcttcgggttgtgaggttaagcgaataagcgtacacggtggatgcctaggcaatcagaggcgatgaaggacgtgctaatctgcgaaaagcgtcggtaaggtgatatgaaccgttatacccgacgatatccgaatggggaaacccagtatccaatggatactatcattaactgaatccataggttaatgaggcgaaccgggagaactgaaacatctcagtaccccgaggaaaagaaatcaaccgagattcccctagtagcggcgagcgaacggggagcagcccagagtcttaatcaatagcagtgtcaggagaacggtctggaaagtccggcagtaaagggtgatagccccgtatctgaagatgctgttgttgtgaactcgacgagtagggcgggacacgtgttatcctgtctgaatatggggggaccatcctccaaggctaaatactcctgattgaccgatagtgaaccagtaccgtgagggaaaggcgaaaagaaccccggcgaggggagtgaaaaagaacctgaaaccgtgtacgtacaagcagtaggagccccatcactcaagtgcctcgcactgagtgatgcaataacatcaccgaaaatagcgccgaatttgctaacaaggttggtcgattttttcaagccgtcgcgcagtgtacctagaagtacacgagcaacggaagttaaaaaatcgggcaagattgaacgcaaaggcaagcgggacatttgaggatggggtgactgcgtaccttttgtataatgggtcagcgacttatattctgtagcaaggttaaccgtataggggagccgtagggaaaccgagtcttaactgggcgaatgagttgcagggtatagacccgaaacccggtgatctatccatgggcaggttgaaggttgggtaacactaactggaggaccgaaccgactaatgttgaaaaattagcggatgacttgtggatgggggtgaaaggccaatcaaaccgggagatagctggttctccccgaaagctatttaggtagcgcctcgtgaactcatcttcgggggtagagcactgtttcgactagggggtcatcccgacttaccaactcgatgcaaactgcgaataccgaagaatgttatcacgggagacacacggcgggtgctaacgtccgtcgtgaagagggaaacaacccagaccgccagctaaggtcccaaagtcatggttaagtgggaaacgaagtgggaaggctcagacagccaggatgttggcttagaagcagccatcatttaaagaaagcgtaatagctcactggtcgagtcggcccgcgcggaagatgtaacggggctaaaccatgcaccgaagctgcggcagcgaacgtatcacttaaatttgtttgagtgaataacgattgacggaacgaagtgacgtcaatgcgttaatgaaagtcgaggcgaaagcacgacaaagcgaatttaaggatacgttcgttgggtaggggagcgttctgtaagcctgcgaaggtgtactgtgaggtatgctggaggtatcagaagtgcgaatgctgacataagtaacgataatgcgggtgaaaaacccgcacgccggaagaccaagggttcctgtccaacgttaatcggggcagggtgagtcgacccctaaggcgaggctgaaaagcgtagtcgatgggaaacgggttaatattcccgtactggtggtaactgcgatgggggaacggagaaggctaggttgtccgggcgacggtcgtcccggttcaagcaggtaggcagagtgattaggcaaatccggtcacttaatgctgagatgtgatgacgaaccaccaaggtggtgaagcaattgatgccccgcttccaggaaaagcctctaagcttcaggttaccaacaatcgtaccccaaaccgacacaggtggtcaggtagagaatactcaggcgcttgagagaactcgggtgaaggaactaggcaaaatggtgccgtaacttcgggagaaggcacgctggcggtaggtaaagtcccttgcggacggcgctgaagccagtcgaagataccagctggctgcaactgtttattaaaaacacagcactgtgcaaacacgaaagtggacgtatacggtgtgacgcctgcccggtgctggaaggttaattgatggggtcagccgtaaggcgaagctcctgatcgaagccccagtaaacggcggccgtaactataacggtcctaaggtagcgaaattccttgtcgggtaagttccgacctgcacgaatggcgtaatgatggccaggctgtctccacccgagactcagtgaaattgaactcgctgtgaagatgcagtgtacccgcggcaagacggaaagaccccgtgaacctttactatagcttgacactgaacattgagccttgatgtgtaggataggtgggaggctttgaagtgtggacgccagtctgcatggagccaaccttgaaataccaccctttaacgtttgatgttctaacctaggcccataaactgggtcggggaccgtgtctggtgggtagtttgactggggcggtctcctcctaaagagtaacggaggagcacgaaggttggctaagcatggtcggacatcatgcggttagtgcaaaggcataagccagcttgactgcgagagtgacggctcgagcaggtacgaaagtaggtcttagtgatccggtggttctgaatggaagggccatcgctcaacggataaaaggtactccggggataacaggctgataccgcccaagagttcatatcgacggcggtgtttggcacctcgatgtcggctcatcacatcctggggctgaagtaggtcccaagggtatggctgttcgccatttaaagtggtacgcgagctgggtttagaacgtcgtgagacagttcggtccctatctgccgtgggcgttggaagattgagaggggttgctcctagtacgagaggaccggagtgaacgcaccactggtgttcgggttgtcatgccaatggcattgcccggtagctaagtgcggaagagataaccgctgaaagcatctaagcgggaaacttgcctcgagatgagtcttccctgtcgctttaagcgacctaaaggaacgtttaagactaagacgttgataggctgggtgtgtaagcgtagcgatacgttgagctaaccagtactaatgaaccgtgaggcttaacctgacaacgccgaagctgttttggcggatgagagaagattttcagcctgatacagattaaatcagaacgcagaagcggtctgataaaacagaatttgcttggcggccatagcgcggtggtcccacctgatcccatgccgaactcagaagtgaaacgccgtagcgccgatggtagtgtggggtctccccatgtgagagtagggaactgccaagcatcaaataaaacgaaaggctcagtcgaaagactgggcctttcgttttatctgttgtttgtcggtgaacgctctcctgagtaggacaaatccgccgggagcggatttgaacgttgcgaagcaacggcccggagggtggcgggcaggacgcccgccataaactgccaggcatcaaattaagcagaaggccatcctgacggatggcctttttgcgtttctacaaactcttcctgtcgtcatatctacaagccggcgcgccgggaaatgtgcgcggaacccctatttgtttatttttctaaatacattcaaatatgtatccgctcatgagacaataaccctgataaatgcttcaataatattgaaaaaggaagagtatgagtattcaacatttccgtgtcgcccttattcccttttttgcggcattttgccttcctgtttttgctcacccagaaacgctggtgaaagtaaaagatgctgaagatcagttgggtgcacgagtgggttacatcgaactggatctcaacagcggtaagatccttgagagttttcgccccgaagaacgttttccaatgatgagcacttttaaagttctgctatgtggcgcggtattatcccgtgttgacgccgggcaagagcaactcggtcgccgcatacactattctcagaatgacttggttgagtactcaccagtcacagaaaagcatcttacggatggcatgacagtaagagaattatgcagtgctgcaataaccatgagtgataacactgcggccaacttacttctgacaacgatcggaggaccgaaggagctaaccgcttttttgcacaacatgggggatcatgtaactcgccttgatcgttgggaaccggagctgaatgaagccataccaaacgacgagcgtgacaccacgatgcctgcagcaatggcaacaacgttgcgcaaactattaactggcgaactacttactctagcttcccggcaacaattaatagactggatggaggcggataaagttgcaggaccacttctgcgctcggcccttccggctagctggtttattgctgataaatctggagccggtgagcgtgggtctcgcggtatcattgcagcactggggccagatggtaagccctcccgtatcgtagttatctacacgacggggagtcaggcaactatggatgaacgaaatagacagatcgctgagataggtgcctcactgattaagcattggtaactgcagaccaagtttactcatatatactttagattgatttaaaacttcatttttaatttaaaaggatctaggtgaagatcctttttgataatctcatgaccaaaatcccttaacgtgagttttcgttccactgagcgtcagaccccgtagaaaagatcaaaggatcttcttgagatcctttttttctgcgcgtaatctgctgcttgcaaacaaaaaaaccaccgctaccagcggtggtttgtttgccggatcaagagctaccaactctttttccgaaggtaactggcttcagcagagcgcagataccaaatactgtccttctagtgtagccgtagttaggccaccacttcaagaactctgtagcaccgcctacatacctcgctctgctaatcctgttaccagtggctgctgccagtggcgataagtcgtgtcttaccgggttggactcaagacgatagttaccggataaggcgcagcggtcgggctgaacggggggttcgtgcacacagcccagcttggagcgaacgacctacaccgaactgagatacctacagcgtgagctatgagaaagcgccacgcttcccgaagggagaaaggcggacaggtatccggtaagcggcagggtcggaacaggagagcgcacgagggagcttccagggggaaacgcctggtatctttatagtcctgtcgggtttcgccacctctgacttgagcgtcgatttttgtgatgctcgtcaggggggcggagcctatggaaaaacgccagcaacgcggcctttttacggttcctggccttttgctgg

SEQ ID NO: 64 - DNA, 7811 bp, Artificial
  Synthetic
agacttagggaccctgcggccgccattaattcctaatttttgttgacactctatcattgatagagttattttaccactccctatcagtgatagagaaaagtgaaatgaatagaccggccgctgagaaaaagcgaagcggctaacaatttatcagacaatctgtgtgggcactcgcagagacgatatcttctaaaaaattagatgtatcaagtcttgaagagtgactaacaagttaattcatataatgaataagctaagttttcgatttctttgagcatcaaacacttttaattgaagagtttgatcatggctcagattgaacgctggcggcaggcctaacacatgcaagtcgagcggtaacaggagaaagcttgctttcttgctgacgagcggcggacgggtgagtaatgtatggggatctgcccgatagagggggataactactggaaacggtggctaataccgcataatgtctacggaccaaagcaggggctcttcggaccttgcactatcggatgaacccatatgggattagctagtaggtggggtaaaggctcacctaggcgacgatctctagctggtctgagaggatgatcagccacactgggactgagacacggcccagactcctacgggaggcagcagtggggaatattgcacaatgggcgcaagcctgatgcagccatgccgcgtgtatgaagaaggccttagggttgtaaagtactttcagcggggaggaaggtgataaggttaatacccttattaattgacgttacccgcagaagaagcaccggctaactccgtgccagcagccgcggtaatacggagggtgcaagcgttaatcggaattactgggcgtaaagcgcacgcaggcggtcaattaagtcagatgtgaaagccccgagcttaacttgggaattgcatctgaaactggttggctagagtcttgtagaggggggtagaattccatgtgtagcggtgaaatgcgtagagatgtggaggaataccggtggcgaaggcggccccctggacaaagactgacgctcaggtgcgaaagcgtggggagcaaacaggattagataccctggtagtccacgctgtaaacgatgtcgatttagaggttgtggtcttgaaccgtggcttctggagctaacgcgttaaatcgaccgcctggggagtacggccgcaaggttaaaactcaaatgaattgacgggggcccgcacaagcggtggagcatgtggtttaattcgatgcaacgcgaagaaccttacctactcttgacatccagcgaatcctttagagatagaggagtgccttcgggaacgctgagacaggtgctgcatggctgtcgtcagctcgtgttgtgaaatgttgggttaagtcccgcaacgagcgcaacccttatcctttgttgccagcacgtaatggtgggaactcaaaggagactgccggtgataaaccggaggaaggtggggatgacgtcaagtcatcatggcccttacgagtagggctacacacgtgctacaatggcagatacaaagagaagcgacctcgcgagagcaagcggaactcataaagtctgtcgtagtccggattggagtctgcaactcgactccatgaagtcggaatcgctagtaatcgtagatcagaatgctacggtgaatacgttcccgggccttgtacacaccgcccgtcacaccatgggagtgggttgcaaaagaagtaggtagcttaaccttcgggagggcgcttaccactttgtgattcatgactggggtgaagtcgtaacaaggtaaccgtaggggaacctgcggttggatcacctccttaccgttgaagtgtttttgtgaagtgttcacacagattgtctgatgaaagagagtcaacggtatcaataggcttgtagctcaggtggttagagcgcacccctgataagggtgaggtcggtggttcaagtccactcaggcctaccaaaatcgaatgaatgctacgttgtatctcagctcgtttacctagtgtaaacgtcgctaagctacgccttgccttaattcgatttcgtctttaatcacaccgattaaagacggcgatgatactgttaaacctgttatggggctatagctcagctgggagagcgcctgccttgcacgcaggaggtcagcggttcgatcccgcttagctccaccataatacttttgaattattcagaatagattagttttagtctattacgaataattatgctctttaacaatctggaacaagctgaaaattgaaacaacgcacattgtttatcgcttaaacaatgtgagagtctctcaaaatttcaaacctgaaattttcggtcattcaaacgagtggcatgagcgagcagggtgaaactcaaggcggacagcgcgcagcaagcgcagcgtacaggagtacgtgtgtattgcgagcactgcccaacgcagaagttcaccacgcacagccatgacagtcaggtgaacgttgaaacaatttcgggttgtgaggttaagcgactaagcgtacacggtggatgcctaggcaatcagaggcgatgaaggacgtgctaatctgcgaaaagcgtcggtaaggtgatatgaaccgttataaccgacgatgtccgaatggggaaacccagtgcaattcgttgcactatcgtttgatgaatccatagtcaaacgaggcgaaccgggggaactgaaacatctcagtaccccgaggaaaagaaatcaaccgagattcccctagtagcggcgagcgaacggggagcagcccagagtcttaatcagcatcagcatcaggagaacggtctggaaaggccggcaataaagggtgatagccccgtatccgaaggtgttggtgttgtgaactcgatgagtagggcgggacacgtgttatcctgtctgaatatggggggaccatcctccaaggctaaatactcctgattgaccgatagtgaaccagtaccgtgagggaaaggcgaaaagaaccccggcgaggggagtgaaatagaacctgaaaccgtgtacgtacaagcagtgggagccccaccactaagccagtggtgagtcatcacagcgtcatccttacttgatggcggttggcggaacgtcctttgtgacgcccaacccaaaaaaatcaagcaaagggggcttagtggtggggtgactgcgtaccttttgtataatgggtcagcgacttatattctgtagcaaggttaaccgtataggggagccgtagggaaaccgagtcttaactgggcgaatgagttgcagggtatagacccgaaacccggtgatctagccatgggcaggttgaaggttgggtaacactaactggaggaccgaaccgactaatgttgaaaaattagcggatgacttgtggctgggggtgaaaggccaatcaaaccgggagatagctggttctccccgaaagctatttaggtagcgcctcgtgaactcatcttcgggggtagagcactgtttcggctagggggtcatcccgacttaccaacccgatgcaaactacgaataccgaagaatgttatcacgggagacacacggcgggtgctaacgttcgtcgtgaagagggaaacaacccagaccgccagctaaggtcccaaagtcatggttaagtgggaaacgaagtgggaaggctcagacagccaggatgttggcttagaagcagccatcatttaaagaaagcgtaatagctcactggtcgagtcggcctgcgcggaagatgtaacggggctaaaccatgcaccgaagctgcggcagcgacatgtaaatgttgttgggtaggggagcgttctgtaagcctgtgaaggtgtgctgcgaggcatgctggaggtatcagaagtgcgaatgctgacataagtaacgataatgcgggtgaaaaacccgcacgccggaagaccaagggttcctgtccaacgttaatcggggcagggtgagtcgacccctaaggcgaggcagaaatgcgtagtcgatgggaaacaggttaatattcctgtactggtgataattgcgatggggggacggagaaggctaggctggccgggcgacggttgtcccggtttaaggatgtaggtgggcgaattaggcaaatccggttcgctatacactgaggtctgatgacgagtcactacggtggcgaagtagctcatgccccgcttccaggaaaagcctctaagctctagattatcattaatcgtaccccaaaccgacacaggtggtcaggtagagaatactcaggcgcttgagagaactcgggtgaaggaactaggcaaaatggtgccgtaacttcgggagaaggcacgctggcactaggtgaagtggtttacccatggagctgaagccagtcgcagataccagctggctgcaactgtttattaaaaacacagcactgtgcaaacacgaaagtggacgtatacggtgtgacgcctgcccggtgctggaaggttaattgatggggttatccgtaaggagaagctcttgatcgaagccccagtaaacggcggccgtaactataacggtcctaaggtagcgaaattccttgtcgggtaagttccgacctgcacgaatggcgtaatgatggccaggctgtctccacccgagactcagtgaaattgaactcgctgtgaagatgcagtgtacccgcggcaagacggaaagaccccgtgaacctttactatagcttgacactgaacattgagccttgatgtgtaggataggtgggaggctttgaagtgtggacgccagtctgcatggagccaaccttgaaataccaccctttaatgtttgatgttctaacgttgccccgtgatccggggtgcggacagtgtctggtgggtagtttgactggggcggtctcctcccaaagcgtaacggaggagcacgaaggttggctaagcatggtcggacatcatgcggttagtgcaaaggcataagccagcttgactgcgagagtgacggctcgagcaggtacgaaagtaggtcttagtgatccggtggttctgaatggaagggccatcgctcaacggataaaaggtactccggggataacaggctgataccgcccaagagttcatatcgacggcggtgtttggcacctcgatgtcggctcatcacatcctggggctgaagtaggtcccaagggtatggctgttcgccatttaaagtggtacgcgagctgggtttagaacgtcgtgagacagttcggtccctatctgccgtgggcgttggaagattgaaaggggctgctcctagtacgagaggaccggagtggacgcaccgctggtgttcgggttgtcatgccaatggcactgcccggtagctaagtgcggaagagataaccgctgaaagcatctaagcgggaaacttgccttgagatgagtcttccctgactctttaagggtcctaaaggaacgtttaagacgaagacgttgataggctgggtgtgtaagcgtagcgatacgttgagctaaccagtactaatgaaccgtgaggcttaacctgacaacaccgaaggtgttttagagagacgaagagacgaattgttgaagcgcacgagagagtggtgcgagaaaatcagcttgttcaagattgcagttctggtttgcggtgtagacgcaaacgggaacgaaaccgaatttgtctggcggcaatagcgcggtggtcccacctgaccccatgccgaactcagcagtgaaacgccgtagcgccgatggtagtgtggggtctccccatgtgagagtagggaactgccagacatcaaatcagtgagaaagccacccgatgggtggcttttttgcgtttgggaaaaaggtaatgagtatcgataagcaagctttataactttaataattaattttttataaattaatttgtttaaatgttaaataaaatccgtttaagttagatcatttttcaactttacttttaatatcaatagataggccataaacacggttttgtgatcatcgggtttgttgttctatatcttctatttacctactctgcgcgccgggaaatgtgcgcggaacccctatttgtttatttttctaaatacattcaaatatgtatccgctcatgagacaataaccctgataaatgcttcaataatattgaaaaaggaagagtatgagtattcaacatttccgtgtcgcccttattcccttttttgcggcattttgccttcctgtttttgctcacccagaaacgctggtgaaagtaaaagatgctgaagatcagttgggtgcacgagtgggttacatcgaactggatctcaacagcggtaagatccttgagagttttcgccccgaagaacgttttccaatgatgagcacttttaaagttctgctatgtggcgcggtattatcccgtgttgacgccgggcaagagcaactcggtcgccgcatacactattctcagaatgacttggttgagtactcaccagtcacagaaaagcatcttacggatggcatgacagtaagagaattatgcagtgctgcaataaccatgagtgataacactgcggccaacttacttctgacaacgatcggaggaccgaaggagctaaccgcttttttgcacaacatgggggatcatgtaactcgccttgatcgttgggaaccggagctgaatgaagccataccaaacgacgagcgtgacaccacgatgcctgcagcaatggcaacaacgttgcgcaaactattaactggcgaactacttactctagcttcccggcaacaattaatagactggatggaggcggataaagttgcaggaccacttctgcgctcggcccttccggctagctggtttattgctgataaatctggagccggtgagcgtgggtctcgcggtatcattgcagcactggggccagatggtaagccctcccgtatcgtagttatctacacgacggggagtcaggcaactatggatgaacgaaatagacagatcgctgagataggtgcctcactgattaagcattggtaactgcagaccaagtttactcatatatactttagattgatttaaaacttcatttttaatttaaaaggatctaggtgaagatcctttttgataatctcatgaccaaaatcccttaacgtgagttttcgttccactgagcgtcagaccccgtagaaaagatcaaaggatcttcttgagatcctttttttctgcgcgtaatctgctgcttgcaaacaaaaaaaccaccgctaccagcggtggtttgtttgccggatcaagagctaccaactctttttccgaaggtaactggcttcagcagagcgcagataccaaatactgtccttctagtgtagccgtagttaggccaccacttcaagaactctgtagcaccgcctacatacctcgctctgctaatcctgttaccagtggctgctgccagtggcgataagtcgtgtcttaccgggttggactcaagacgatagttaccggataaggcgcagcggtcgggctgaacggggggttcgtgcacacagcccagcttggagcgaacgacctacaccgaactgagatacctacagcgtgagctatgagaaagcgccacgcttcccgaagggagaaaggcggacaggtatccggtaagcggcagggtcggaacaggagagcgcacgagggagcttccagggggaaacgcctggtatctttatagtcctgtcgggtttcgccacctctgacttgagcgtcgatttttgtgatgctcgtcaggggggcggagcctatggaaaaacgccagcaacgcggcctttttacggttcctggccttttgctgg

SEQ ID NO: 65 - DNA, 7528 bp, Artificial
  Synthetic
agacttagggaccctgcggccgccattaattcctaatttttgttgacactctatcattgatagagttattttaccactccctatcagtgatagagaaaagtgaaatgaatagaccggccgctgagaaaaagcgaagcggcactgctctttaacaatttatcagacaatctgtgtgggcactcgaagatacggattcttaacgtcgcaagacgaaaaatgaataccaagtctcaagagtgaacacgtaattcattacgaagtttaattctttgagcgtcaaactttttaattgaagagtttgatcatggctcagattgaacgctggcggcaggcctaacacatgcaagtcgagcggtaacaggagaaagcttgctttcttgctgacgagcggcggacgggtgagtaatgtatggggatctgcccgatagagggggataactactggaaacggtggctaataccgcataatgtctacggaccaaagcaggggctcttcggaccttgcactatcggatgaacccatatgggattagctagtaggtggggtaaaggctcacctaggcgacgatctctagctggtctgagaggatgatcagccacactgggactgagacacggcccagactcctacgggaggcagcagtggggaatattgcacaatgggcgcaagcctgatgcagccatgccgcgtgtatgaagaaggccttagggttgtaaagtactttcagcggggaggaaggtgataaggttaatacccttattaattgacgttacccgcagaagaagcaccggctaactccgtgccagcagccgcggtaatacggagggtgcaagcgttaatcggaattactgggcgtaaagcgcacgcaggcggtcaattaagtcagatgtgaaagccccgagcttaacttgggaattgcatctgaaactggttggctagagtcttgtagaggggggtagaattccatgtgtagcggtgaaatgcgtagagatgtggaggaataccggtggcgaaggcggccccctggacaaagactgacgctcaggtgcgaaagcgtggggagcaaacaggattagataccctggtagtccacgctgtaaacgatgtcgatttagaggttgtggtcttgaaccgtggcttctggagctaacgcgttaaatcgaccgcctggggagtacggccgcaaggttaaaactcaaatgaattgacgggggcccgcacaagcggtggagcatgtggtttaattcgatgcaacgcgaagaaccttacctactcttgacatccagcgaatcctttagagatagaggagtgccttcgggaacgctgagacaggtgctgcatggctgtcgtcagctcgtgttgtgaaatgttgggttaagtcccgcaacgagcgcaacccttatcctttgttgccagcacgtaatggtgggaactcaaaggagactgccggtgataaaccggaggaaggtggggatgacgtcaagtcatcatggcccttacgagtagggctacacacgtgctacaatggcagatacaaagagaagcgacctcgcgagagcaagcggaactcataaagtctgtcgtagtccggattggagtctgcaactcgactccatgaagtcggaatcgctagtaatcgtagatcagaatgctacggtgaatacgttcccgggccttgtacacaccgcccgtcacaccatgggagtgggttgcaaaagaagtaggtagcttaaccttcgggagggcgcttaccactttgtgattcatgactggggtgaagtcgtaacaaggtaaccgtaggggaacctgcggttggatcacctccttaccttaaagaagcgtactttgtagtgctcacacagattgtctgatagaaagtgaaaagcaaggcgtttacgcgttgggagtgaggctgaagagaataaggccgttcgctttctattaatgaaagctcaccctacacgaaaatatcacgcaacgcgtgataagcaattttcgtgtccccttcgtctagaggcccaggacaccgccctttcacggcggtaacaggggttcgaatcccctaggggacgccacttgctggtttgtgagtgaaagtcgccgaccttaatatctcaaaactcatcttcgggtgatgtttgagatatttgctctttaaaaatctggatcaagctgaaaattgaaacactgaacaacgagagttgttcgtgagtctctcaaattttcgcaacacgatgatgaatcgaaagaaacatcttcgggttgtgaggttaagcgactaagcgtacacggtggatgcctaggcaatcagaggcgatgaaggacgtgctaatctgcgaaaagcgtcggtaaggtgatatgaaccgttataaccgacgatgtccgaatggggaaacccagtgcaattcgttgcactatcgtttgatgaatccatagtcaaacgaggcgaaccgggggaactgaaacatctcagtaccccgaggaaaagaaatcaaccgagattcccctagtagcggcgagcgaacggggagcagcccagagtcttaatcagcatcagcatcaggagaacggtctggaaaggccggcaataaagggtgatagccccgtatccgaaggtgttggtgttgtgaactcgatgagtagggcgggacacgtgttatcctgtctgaatatggggggaccatcctccaaggctaaatactcctgattgaccgatagtgaaccagtaccgtgagggaaaggcgaaaagaaccccggcgaggggagtgaaatagaacctgaaaccgtgtacgtacaagcagtgggagccccaccactaagccagtggtgagtcatcacagcgtcatccttacttgatggcggttggcggaacgtcctttgtgacgcccaacccaaaaaaatcaagcaaagggggcttagtggtggggtgactgcgtaccttttgtataatgggtcagcgacttatattctgtagcaaggttaaccgtataggggagccgtagggaaaccgagtcttaactgggcgaatgagttgcagggtatagacccgaaacccggtgatctagccatgggcaggttgaaggttgggtaacactaactggaggaccgaaccgactaatgttgaaaaattagcggatgacttgtggctgggggtgaaaggccaatcaaaccgggagatagctggttctccccgaaagctatttaggtagcgcctcgtgaactcatcttcgggggtagagcactgtttcggctagggggtcatcccgacttaccaacccgatgcaaactacgaataccgaagaatgttatcacgggagacacacggcgggtgctaacgttcgtcgtgaagagggaaacaacccagaccgccagctaaggtcccaaagtcatggttaagtgggaaacgaagtgggaaggctcagacagccaggatgttggcttagaagcagccatcatttaaagaaagcgtaatagctcactggtcgagtcggcctgcgcggaagatgtaacggggctaaaccatgcaccgaagctgcggcagcgacatgtaaatgttgttgggtaggggagcgttctgtaagcctgtgaaggtgtgctgcgaggcatgctggaggtatcagaagtgcgaatgctgacataagtaacgataatgcgggtgaaaaacccgcacgccggaagaccaagggttcctgtccaacgttaatcggggcagggtgagtcgacccctaaggcgaggcagaaatgcgtagtcgatgggaaacaggttaatattcctgtactggtgataattgcgatggggggacggagaaggctaggctggccgggcgacggttgtcccggtttaaggatgtaggtgggcgaattaggcaaatccggttcgctatacactgaggtctgatgacgagtcactacggtggcgaagtagctcatgccccgcttccaggaaaagcctctaagctctagattatcattaatcgtaccccaaaccgacacaggtggtcaggtagagaatactcaggcgcttgagagaactcgggtgaaggaactaggcaaaatggtgccgtaacttcgggagaaggcacgctggcactaggtgaagtggtttacccatggagctgaagccagtcgcagataccagctggctgcaactgtttattaaaaacacagcactgtgcaaacacgaaagtggacgtatacggtgtgacgcctgcccggtgctggaaggttaattgatggggttatccgtaaggagaagctcttgatcgaagccccagtaaacggcggccgtaactataacggtcctaaggtagcgaaattccttgtcgggtaagttccgacctgcacgaatggcgtaatgatggccaggctgtctccacccgagactcagtgaaattgaactcgctgtgaagatgcagtgtacccgcggcaagacggaaagaccccgtgaacctttactatagcttgacactgaacattgagccttgatgtgtaggataggtgggaggctttgaagtgtggacgccagtctgcatggagccaaccttgaaataccaccctttaatgtttgatgttctaacgttgccccgtgatccggggtgcggacagtgtctggtgggtagtttgactggggcggtctcctcccaaagcgtaacggaggagcacgaaggttggctaagcatggtcggacatcatgcggttagtgcaaaggcataagccagcttgactgcgagagtgacggctcgagcaggtacgaaagtaggtcttagtgatccggtggttctgaatggaagggccatcgctcaacggataaaaggtactccggggataacaggctgataccgcccaagagttcatatcgacggcggtgtttggcacctcgatgtcggctcatcacatcctggggctgaagtaggtcccaagggtatggctgttcgccatttaaagtggtacgcgagctgggtttagaacgtcgtgagacagttcggtccctatctgccgtgggcgttggaagattgaaaggggctgctcctagtacgagaggaccggagtggacgcaccgctggtgttcgggttgtcatgccaatggcactgcccggtagctaagtgcggaagagataaccgctgaaagcatctaagcgggaaacttgccttgagatgagtcttccctgactctttaagggtcctaaaggaacgtttaagacgaagacgttgataggctgggtgtgtaagcgtagcgatacgttgagctaaccagtactaatgaaccgtgaggcttaacctgacaacgccgaagctgttttggcggatgagagaagattttcagcctgatacagattaaatcagaacgcagaagcggtctgataaaacagaatttgtctggcggcaatagcgcggtggtcccacctgaccccatgccgaactcagcagtgaaacgccgtagcgccgatggtagtgtggggtctccccatgtgagagtagggaactgccagacatcaaataaaacgaaaggctcagtcgaaagactgggcctttcgttttatctgttgtttgtcggtgaacgctctcctgagtaggacaaatccgccgggagcggatttgaacgttgcgaagcaacggcccggagggtggcgggcaggacgcccgccataaactgccaggcatcaaattaagcagaaggccatcctgacggatggcctttttgcgtttctacaaactcttcctgtcgtcatatctacaagccggcgcgccgggaaatgtgcgcggaacccctatttgtttatttttctaaatacattcaaatatgtatccgctcatgagacaataaccctgataaatgcttcaataatattgaaaaaggaagagtatgagtattcaacatttccgtgtcgcccttattcccttttttgcggcattttgccttcctgtttttgctcacccagaaacgctggtgaaagtaaaagatgctgaagatcagttgggtgcacgagtgggttacatcgaactggatctcaacagcggtaagatccttgagagttttcgccccgaagaacgttttccaatgatgagcacttttaaagttctgctatgtggcgcggtattatcccgtgttgacgccgggcaagagcaactcggtcgccgcatacactattctcagaatgacttggttgagtactcaccagtcacagaaaagcatcttacggatggcatgacagtaagagaattatgcagtgctgcaataaccatgagtgataacactgcggccaacttacttctgacaacgatcggaggaccgaaggagctaaccgcttttttgcacaacatgggggatcatgtaactcgccttgatcgttgggaaccggagctgaatgaagccataccaaacgacgagcgtgacaccacgatgcctgcagcaatggcaacaacgttgcgcaaactattaactggcgaactacttactctagcttcccggcaacaattaatagactggatggaggcggataaagttgcaggaccacttctgcgctcggcccttccggctagctggtttattgctgataaatctggagccggtgagcgtgggtctcgcggtatcattgcagcactggggccagatggtaagccctcccgtatcgtagttatctacacgacggggagtcaggcaactatggatgaacgaaatagacagatcgctgagataggtgcctcactgattaagcattggtaactgcagaccaagtttactcatatatactttagattgatttaaaacttcatttttaatttaaaaggatctaggtgaagatcctttttgataatctcatgaccaaaatcccttaacgtgagttttcgttccactgagcgtcagaccccgtagaaaagatcaaaggatcttcttgagatcctttttttctgcgcgtaatctgctgcttgcaaacaaaaaaaccaccgctaccagcggtggtttgtttgccggatcaagagctaccaactctttttccgaaggtaactggcttcagcagagcgcagataccaaatactgtccttctagtgtagccgtagttaggccaccacttcaagaactctgtagcaccgcctacatacctcgctctgctaatcctgttaccagtggctgctgccagtggcgataagtcgtgtcttaccgggttggactcaagacgatagttaccggataaggcgcagcggtcgggctgaacggggggttcgtgcacacagcccagcttggagcgaacgacctacaccgaactgagatacctacagcgtgagctatgagaaagcgccacgcttcccgaagggagaaaggcggacaggtatccggtaagcggcagggtcggaacaggagagcgcacgagggagcttccagggggaaacgcctggtatctttatagtcctgtcgggtttcgccacctctgacttgagcgtcgatttttgtgatgctcgtcaggggggcggagcctatggaaaaacgccagcaacgcggcctttttacggttcctggccttttgctgg

SEQ ID NO: 66 - DNA, 7811 bp, Artificial
  Synthetic
agacttagggaccctgcggccgccattaattcctaatttttgttgacactctatcattgatagagttattttaccactccctatcagtgatagagaaaagtgaaatgaatagaccggccgctgagaaaaagcgaagcggctaacaatttatcagacaatctgtgtgggcactcgcagagacgatatcttctaaaaaattagatgtatcaagtcttgaagagtgactaacaagttaattcatataatgaataagctaagttttcgatttctttgagcatcaaacacttttaattgaagagtttgatcatggctcagattgaacgctggcggcaggcctaacacatgcaagtcgagcggtaacaggagaaagcttgctttcttgctgacgagcggcggacgggtgagtaatgtatggggatctgcccgatagagggggataactactggaaacggtggctaataccgcataatgtctacggaccaaagcaggggctcttcggaccttgcactatcggatgaacccatatgggattagctagtaggtggggtaaaggctcacctaggcgacgatctctagctggtctgagaggatgatcagccacactgggactgagacacggcccagactcctacgggaggcagcagtggggaatattgcacaatgggcgcaagcctgatgcagccatgccgcgtgtatgaagaaggccttagggttgtaaagtactttcagcggggaggaaggtgataaggttaatacccttattaattgacgttacccgcagaagaagcaccggctaactccgtgccagcagccgcggtaatacggagggtgcaagcgttaatcggaattactgggcgtaaagcgcacgcaggcggtcaattaagtcagatgtgaaagccccgagcttaacttgggaattgcatctgaaactggttggctagagtcttgtagaggggggtagaattccatgtgtagcggtgaaatgcgtagagatgtggaggaataccggtggcgaaggcggccccctggacaaagactgacgctcaggtgcgaaagcgtggggagcaaacaggattagataccctggtagtccacgctgtaaacgatgtcgatttagaggttgtggtcttgaaccgtggcttctggagctaacgcgttaaatcgaccgcctggggagtacggccgcaaggttaaaactcaaatgaattgacgggggcccgcacaagcggtggagcatgtggtttaattcgatgcaacgcgaagaaccttacctactcttgacatccagcgaatcctttagagatagaggagtgccttcgggaacgctgagacaggtgctgcatggctgtcgtcagctcgtgttgtgaaatgttgggttaagtcccgcaacgagcgcaacccttatcctttgttgccagcacgtaatggtgggaactcaaaggagactgccggtgataaaccggaggaaggtggggatgacgtcaagtcatcatggcccttacgagtagggctacacacgtgctacaatggcagatacaaagagaagcgacctcgcgagagcaagcggaactcataaagtctgtcgtagtccggattggagtctgcaactcgactccatgaagtcggaatcgctagtaatcgtagatcagaatgctacggtgaatacgttcccgggccttgtacacaccgcccgtcacaccatgggagtgggttgcaaaagaagtaggtagcttaaccttcgggagggcgcttaccactttgtgattcatgactggggtgaagtcgtaacaaggtaaccgtaggggaacctgcggttggatcatgtggttaccgttgaagtgtttttgtgaagtgttcacacagattgtctgatgaaagagagtcaacggtatcaataggcttgtagctcaggtggttagagcgcacccctgataagggtgaggtcggtggttcaagtccactcaggcctaccaaaatcgaatgaatgctacgttgtatctcagctcgtttacctagtgtaaacgtcgctaagctacgccttgccttaattcgatttcgtctttaatcacaccgattaaagacggcgatgatactgttaaacctgttatggggctatagctcagctgggagagcgcctgccttgcacgcaggaggtcagcggttcgatcccgcttagctccaccataatacttttgaattattcagaatagattagttttagtctattacgaataattatgctctttaacaatctggaacaagctgaaaattgaaacaacgcacattgtttatcgcttaaacaatgtgagagtctctcaaaatttcaaacctgaaattttcggtcattcaaacgagtggcatgagcgagcagggtgaaactcaaggcggacagcgcgcagcaagcgcagcgtacaggagtacgtgtgtattgcgagcactgcccaacgcagaagttcaccacgcacagccatgacagtcaggtgaacgttgaaacaatttcgggttgtgaggttaagcgactaagcgtacacggtggatgcctaggcaatcagaggcgatgaaggacgtgctaatctgcgaaaagcgtcggtaaggtgatatgaaccgttataaccgacgatgtccgaatggggaaacccagtgcaattcgttgcactatcgtttgatgaatccatagtcaaacgaggcgaaccgggggaactgaaacatctcagtaccccgaggaaaagaaatcaaccgagattcccctagtagcggcgagcgaacggggagcagcccagagtcttaatcagcatcagcatcaggagaacggtctggaaaggccggcaataaagggtgatagccccgtatccgaaggtgttggtgttgtgaactcgatgagtagggcgggacacgtgttatcctgtctgaatatggggggaccatcctccaaggctaaatactcctgattgaccgatagtgaaccagtaccgtgagggaaaggcgaaaagaaccccggcgaggggagtgaaatagaacctgaaaccgtgtacgtacaagcagtgggagccccaccactaagccagtggtgagtcatcacagcgtcatccttacttgatggcggttggcggaacgtcctttgtgacgcccaacccaaaaaaatcaagcaaagggggcttagtggtggggtgactgcgtaccttttgtataatgggtcagcgacttatattctgtagcaaggttaaccgtataggggagccgtagggaaaccgagtcttaactgggcgaatgagttgcagggtatagacccgaaacccggtgatctagccatgggcaggttgaaggttgggtaacactaactggaggaccgaaccgactaatgttgaaaaattagcggatgacttgtggctgggggtgaaaggccaatcaaaccgggagatagctggttctccccgaaagctatttaggtagcgcctcgtgaactcatcttcgggggtagagcactgtttcggctagggggtcatcccgacttaccaacccgatgcaaactacgaataccgaagaatgttatcacgggagacacacggcgggtgctaacgttcgtcgtgaagagggaaacaacccagaccgccagctaaggtcccaaagtcatggttaagtgggaaacgaagtgggaaggctcagacagccaggatgttggcttagaagcagccatcatttaaagaaagcgtaatagctcactggtcgagtcggcctgcgcggaagatgtaacggggctaaaccatgcaccgaagctgcggcagcgacatgtaaatgttgttgggtaggggagcgttctgtaagcctgtgaaggtgtgctgcgaggcatgctggaggtatcagaagtgcgaatgctgacataagtaacgataatgcgggtgaaaaacccgcacgccggaagaccaagggttcctgtccaacgttaatcggggcagggtgagtcgacccctaaggcgaggcagaaatgcgtagtcgatgggaaacaggttaatattcctgtactggtgataattgcgatggggggacggagaaggctaggctggccgggcgacggttgtcccggtttaaggatgtaggtgggcgaattaggcaaatccggttcgctatacactgaggtctgatgacgagtcactacggtggcgaagtagctcatgccccgcttccaggaaaagcctctaagctctagattatcattaatcgtaccccaaaccgacacaggtggtcaggtagagaatactcaggcgcttgagagaactcgggtgaaggaactaggcaaaatggtgccgtaacttcgggagaaggcacgctggcactaggtgaagtggtttacccatggagctgaagccagtcgcagataccagctggctgcaactgtttattaaaaacacagcactgtgcaaacacgaaagtggacgtatacggtgtgacgcctgcccggtgctggaaggttaattgatggggttatccgtaaggagaagctcttgatcgaagccccagtaaacggcggccgtaactataacggtcctaaggtagcgaaattccttgtcgggtaagttccgacctgcacgaatggcgtaatgatggccaggctgtctccacccgagactcagtgaaattgaactcgctgtgaagatgcagtgtacccgcggcaagacggaaagaccccgtgaacctttactatagcttgacactgaacattgagccttgatgtgtaggataggtgggaggctttgaagtgtggacgccagtctgcatggagccaaccttgaaataccaccctttaatgtttgatgttctaacgttgccccgtgatccggggtgcggacagtgtctggtgggtagtttgactggggcggtctcctcccaaagcgtaacggaggagcacgaaggttggctaagcatggtcggacatcatgcggttagtgcaaaggcataagccagcttgactgcgagagtgacggctcgagcaggtacgaaagtaggtcttagtgatccggtggttctgaatggaagggccatcgctcaacggataaaaggtactccggggataacaggctgataccgcccaagagttcatatcgacggcggtgtttggcacctcgatgtcggctcatcacatcctggggctgaagtaggtcccaagggtatggctgttcgccatttaaagtggtacgcgagctgggtttagaacgtcgtgagacagttcggtccctatctgccgtgggcgttggaagattgaaaggggctgctcctagtacgagaggaccggagtggacgcaccgctggtgttcgggttgtcatgccaatggcactgcccggtagctaagtgcggaagagataaccgctgaaagcatctaagcgggaaacttgccttgagatgagtcttccctgactctttaagggtcctaaaggaacgtttaagacgaagacgttgataggctgggtgtgtaagcgtagcgatacgttgagctaaccagtactaatgaaccgtgaggcttaacctgacaacaccgaaggtgttttagagagacgaagagacgaattgttgaagcgcacgagagagtggtgcgagaaaatcagcttgttcaagattgcagttctggtttgcggtgtagacgcaaacgggaacgaaaccgaatttgtctggcggcaatagcgcggtggtcccacctgaccccatgccgaactcagcagtgaaacgccgtagcgccgatggtagtgtggggtctccccatgtgagagtagggaactgccagacatcaaatcagtgagaaagccacccgatgggtggcttttttgcgtttgggaaaaaggtaatgagtatcgataagcaagctttataactttaataattaattttttataaattaatttgtttaaatgttaaataaaatccgtttaagttagatcatttttcaactttacttttaatatcaatagataggccataaacacggttttgtgatcatcgggtttgttgttctatatcttctatttacctactctgcgcgccgggaaatgtgcgcggaacccctatttgtttatttttctaaatacattcaaatatgtatccgctcatgagacaataaccctgataaatgcttcaataatattgaaaaaggaagagtatgagtattcaacatttccgtgtcgcccttattcccttttttgcggcattttgccttcctgtttttgctcacccagaaacgctggtgaaagtaaaagatgctgaagatcagttgggtgcacgagtgggttacatcgaactggatctcaacagcggtaagatccttgagagttttcgccccgaagaacgttttccaatgatgagcacttttaaagttctgctatgtggcgcggtattatcccgtgttgacgccgggcaagagcaactcggtcgccgcatacactattctcagaatgacttggttgagtactcaccagtcacagaaaagcatcttacggatggcatgacagtaagagaattatgcagtgctgcaataaccatgagtgataacactgcggccaacttacttctgacaacgatcggaggaccgaaggagctaaccgcttttttgcacaacatgggggatcatgtaactcgccttgatcgttgggaaccggagctgaatgaagccataccaaacgacgagcgtgacaccacgatgcctgcagcaatggcaacaacgttgcgcaaactattaactggcgaactacttactctagcttcccggcaacaattaatagactggatggaggcggataaagttgcaggaccacttctgcgctcggcccttccggctagctggtttattgctgataaatctggagccggtgagcgtgggtctcgcggtatcattgcagcactggggccagatggtaagccctcccgtatcgtagttatctacacgacggggagtcaggcaactatggatgaacgaaatagacagatcgctgagataggtgcctcactgattaagcattggtaactgcagaccaagtttactcatatatactttagattgatttaaaacttcatttttaatttaaaaggatctaggtgaagatcctttttgataatctcatgaccaaaatcccttaacgtgagttttcgttccactgagcgtcagaccccgtagaaaagatcaaaggatcttcttgagatcctttttttctgcgcgtaatctgctgcttgcaaacaaaaaaaccaccgctaccagcggtggtttgtttgccggatcaagagctaccaactctttttccgaaggtaactggcttcagcagagcgcagataccaaatactgtccttctagtgtagccgtagttaggccaccacttcaagaactctgtagcaccgcctacatacctcgctctgctaatcctgttaccagtggctgctgccagtggcgataagtcgtgtcttaccgggttggactcaagacgatagttaccggataaggcgcagcggtcgggctgaacggggggttcgtgcacacagcccagcttggagcgaacgacctacaccgaactgagatacctacagcgtgagctatgagaaagcgccacgcttcccgaagggagaaaggcggacaggtatccggtaagcggcagggtcggaacaggagagcgcacgagggagcttccagggggaaacgcctggtatctttatagtcctgtcgggtttcgccacctctgacttgagcgtcgatttttgtgatgctcgtcaggggggcggagcctatggaaaaacgccagcaacgcggcctttttacggttcctggccttttgctgg

SEQ ID NO: 67 - DNA, 7508 bp, Artificial
  Synthetic
agacttagggaccctgcggccgccattaattcctaatttttgttgacactctatcattgatagagttattttaccactccctatcagtgatagagaaaagtgaaatgaatagaccggccgctgagaaaaagcgaagcggccactcgttgatgataatcaaaaaagatttatcaatgaactgagtgaccatttgaatgagcaatcattcagcacagtcaattcactatcgaaagatagtatcagtattcattgagccgaagcgaaagcttcacaaaacttttaattgaagagtttgatcatggctcagattgaacgctggcggcaggcctaacacatgcaagtcgagcggcagcacagaggaacttgttccttgggtggcgagcggcggacgggtgagtaatgcctgggaaattgcccggtagagggggataaccattggaaacgatggctaataccgcataacctcgcaagagcaaagcaggggaccttcgggccttgcgctaccggatatgcccaggtgggattagctagttggtgaggtaagggctcaccaaggcgacgatccctagctggtctgagaggatgatcagccacactggaactgagacacggtccagactcctacgggaggcagcagtggggaatattgcacaatgggcgcaagcctgatgcagccatgccgcgtgtatgaagaaggccttcgggttgtaaagtactttcagtagggaggaaggtggttaagttaataccttaatcatttgacgttacctacagaagaagcaccggctaactccgtgccagcagccgcggtaatacggagggtgcaagcgttaatcggaattactgggcgtaaagcgcatgcaggtggtttgttaagtcagatgtgaaagccctgggctcaacctaggaatcgcatttgaaactgacaagctagagtactgtagaggggggtagaatttcaggtgtagcggtgaaatgcgtagagatctgaaggaataccggtggcgaaggcggccccctggacagatactgacactcagatgcgaaagcgtggggagcaaacaggattagataccctggtagtccacgccgtaaacgatgtctacttggaggttgtgacctagagtcgtggctttcggagctaacgcgttaagtagaccgcctggggagtacggtcgcaagattaaaactcaaatgaattgacgggggcccgcacaagcggtggagcatgtggtttaattcgatgcaacgcgaagaaccttacctactcttgacatccagagaatctagcggagacgctggagtgccttcgggagctctgagacaggtgctgcatggctgtcgtcagctcgtgttgtgaaatgttgggttaagtcccgcaacgagcgcaacccttatccttgtttgccagcacgtaatggtgggaactccagggagactgccggtgataaaccggaggaaggtggggacgacgtcaagtcatcatggcccttacgagtagggctacacacgtgctacaatggcgtatacagagggcagcgataccgcgaggtggagcgaatctcacaaagtacgtcgtagtccggattggagtctgcaactcgactccatgaagtcggaatcgctagtaatcgcaaatcagaatgttgcggtgaatacgttcccgggccttgtacacaccgcccgtcacaccatgggagtgggctgcaaaagaagcaggtagtttaaccttcgggaggacgcttgccactttgtggttcatgactggggtgaagtcgtaacaaggtagcgctaggggaacctggcgctggatcacctccttaacacgatggttatcgtgatgagtgtccacacagattgattcggtttagatttgagcattaagtgggtctgtagctcaggtggttagagcgtacgcctgataagcgtaaggtcggtggttcgagtccactcagacccaccactaacgatggggttatagctcagctgggagagcgcctgccttgcacgcaggaggtctgcggttcgatcccgcataactccaccatctttaagcgttttcgctgagaatgtttaaaaatggttttcatcagaaaatcttgctctttaacaatttggaaagctgacaaaacaacaatttattgttgtttgtaaagttctcaatgtttatcgaaagataaacaccaacaacacattcaagtgtgcttggtatcgaataagacttcggtcttgttcaaatttgagtccggcaaaatctgtctcgcactcatgtaaattaaacgcgagacaacttaggttgtttaaacaacaacccgaaactccttcgggttgtatggttaagtgactaagcgtacacggtggatgcctgggcagtcagaggcgatgaaggacgtactaacttgcgataagcgcagataaggcagtaagagccgtttgagtctgcgatttccgaatggggaaacccaactgcataagcagttactgttaactgaatacataggttaacagagcaaaccgggggaactgaaacatctaagtaccccgaggagaagaaatcaaccgagattccggtagtagcggcgagcgaacctggattagcccttaagcactcggtgaagtaggtgaacaagctggaaagcttggcgatacagggtgatagccccgtaaccgacgcttcatcgagcgtgaaatcgagtagggcgggacacgtgatatcctgtctgaatatggggggaccatcctccaaggctaaatactcctgactgaccgatagtgaaccagtaccgtgagggaaaggcgaaaagaacccctgtgaggggagtgaaatagaacctgaaaccgtgtacgtacaagcagtaggagcaccttcgtggtgtgactgcgtaccttttgtataatgggtcagcgacttatattcagtggcaaggttaaccgtataggggagccgtagcgaaagcgagtcttaattgggcgctcagtctctggatatagacccgaaaccgggtgatctagccatgggcaggttgaaggttgagtaacatcaactggaggaccgaaccgactaatgttgaaaaattagcggatgacttgtggctaggggtgaaaggccaatcaaactcggagatagctggttctccccgaaagctatttaggtagcgcctcggacgaatactactgggggtagagcactgttaaggctagggggtcatcccgacttaccaaccctttgcaaactccgaataccagtaagtactatccgggagacacacggcgggtgctaacgtccgtcgtggagagggaaacaacccagaccgccagctaaggtcccaaagtattgctaagtgggaaacgatgtgggaaggctcagacagctaggatgttggcttagaagcagccatcatttaaagaaagcgtaatagctcactagtcgagtcggcctgcgcggaagatgtaacggggctaagcaatacaccgaagctgcggcaatgtcttttagatattgggtaggggagcgttctgtaagccgttgaaggtgaatcgtaaggtttgctggaggtatcagaagtgcgaatgctgacatgagtaacgacaaagggggtgaaaaacctcctcgccggaagaccaagggttcctgtccaacgttaatcggggcagggtgagtcgacccctaaggtgaggccgaaaggcgtaatcgatgggaaacgggttaatattcccgtacttctgactattgcgatggggggacggagaaggctaggtgggccaggcgacggttgtcctggttcaagtgcgtaggcttgagagttaggtaaatccggctctctttaaggctgagacacgacgtcgagctgctacggcagtgaagtcattgatgccatgcttccaggaaaagcctctaagcttcagatagtcaggaatcgtaccccaaaccgacacaggtggtcgggtagagaataccaaggcgcttgagagaactcgggtgaaggaactaggcaaaatggtaccgtaacttcgggagaaggtacgctcttgatggtgaagtccctcgcggatggagctgacgagagtcgcagataccaggtggctgcaactgtttattaaaaacacagcactgtgcaaaatcgcaagatgacgtatacggtgtgacgcctgcccggtgccggaaggttaattgatggggttagcgcaagcgaagctcttgatcgaagccccggtaaacggcggccgtaactataacggtcctaaggtagcgaaattccttgtcgggtaagttccgacctgcacgaatggcgtaatgatggccacgctgtctccacccgagactcagtgaaattgaaatcgctgtgaagatgcagtgtacccgcggctagacggaaagaccccgtgaacctttactacagcttggcactgaacattgaacctacatgtgtaggataggtgggagtctatgaagacgtgacgccagttgcgttggagccgtccttgaaataccacccttgtatgtttgatgttctaacgttggcccctaatcggggttgcggacagtgcctggtgggtagtttgactggggcggtctcctcccaaagagtaacggaggagcacgaaggtgggctaatcacggttggacatcgtgaggttagtgcaatggcataagcccgcttaactgcgagaatgacggttcgagcaggtgcgaaagcaggtcatagtgatccggtggttctgtatggaagggccatcgctcaacggataaaaggtactccggggataacaggctgataccgcccaagagttcatatcgacggcggtgtttggcacctcgatgtcggctcatcacatcctggggctgaagtcggtcccaagggtatggctgttcgccatttaaagtggtacgcgagctgggtttagaacgtcgtgagacagttcggtccctatctgccgtgggcgttggaagattgaagggggctgctcctagtacgagaggaccggagtggacgaacctctggtgttcgggttgtgtcgccagacgcattgcccggtagctaagttcggaattgataagcgctgaaagcatctaagcgcgaagcgagccctgagatgagtcttccctgacggtttaaccgtcctaaagggttgttcgagactagaacgttgataggcagggtgtgtaagcgttgtgaggcgttgagctaacctgtactaattgcccgtgaggcttaaccatacaacacccaaggggttttgtagtggactcaaagctgagcgcataagaatgtgttgagagaatgaaaacagctttccagaattgttggttatcactttttaagaaaaagtgaaatcaaaaacagaatttgcttggcgaccatagcgttttggacccacctgactccatcccgaactcagaagtgaaacgaaacagcgtcgatggtagtgtggggtctccccatgtgagagtagaacatcgccaggcttttaatctcgctgatagtgtcaccacgctacacgctattagcacacaatttgcggagagatggctgagtggttgaaagcaccggtcttgaaaaccggcgatggttaatagctatcctagggttcaaatccctatctctccgccactattaagaaaggccgctgataactcagcggcctttttgcattctgtcattttgattttcaatatctaggttatcgatacagtaccgataacctattcttctaaagttctgcgcgccgggaaatgtgcgcggaacccctatttgtttatttttctaaatacattcaaatatgtatccgctcatgagacaataaccctgataaatgcttcaataatattgaaaaaggaagagtatgagtattcaacatttccgtgtcgcccttattcccttttttgcggcattttgccttcctgtttttgctcacccagaaacgctggtgaaagtaaaagatgctgaagatcagttgggtgcacgagtgggttacatcgaactggatctcaacagcggtaagatccttgagagttttcgccccgaagaacgttttccaatgatgagcacttttaaagttctgctatgtggcgcggtattatcccgtgttgacgccgggcaagagcaactcggtcgccgcatacactattctcagaatgacttggttgagtactcaccagtcacagaaaagcatcttacggatggcatgacagtaagagaattatgcagtgctgcaataaccatgagtgataacactgcggccaacttacttctgacaacgatcggaggaccgaaggagctaaccgcttttttgcacaacatgggggatcatgtaactcgccttgatcgttgggaaccggagctgaatgaagccataccaaacgacgagcgtgacaccacgatgcctgcagcaatggcaacaacgttgcgcaaactattaactggcgaactacttactctagcttcccggcaacaattaatagactggatggaggcggataaagttgcaggaccacttctgcgctcggcccttccggctagctggtttattgctgataaatctggagccggtgagcgtgggtctcgcggtatcattgcagcactggggccagatggtaagccctcccgtatcgtagttatctacacgacggggagtcaggcaactatggatgaacgaaatagacagatcgctgagataggtgcctcactgattaagcattggtaactgcagaccaagtttactcatatatactttagattgatttaaaacttcatttttaatttaaaaggatctaggtgaagatcctttttgataatctcatgaccaaaatcccttaacgtgagttttcgttccactgagcgtcagaccccgtagaaaagatcaaaggatcttcttgagatcctttttttctgcgcgtaatctgctgcttgcaaacaaaaaaaccaccgctaccagcggtggtttgtttgccggatcaagagctaccaactctttttccgaaggtaactggcttcagcagagcgcagataccaaatactgtccttctagtgtagccgtagttaggccaccacttcaagaactctgtagcaccgcctacatacctcgctctgctaatcctgttaccagtggctgctgccagtggcgataagtcgtgtcttaccgggttggactcaagacgatagttaccggataaggcgcagcggtcgggctgaacggggggttcgtgcacacagcccagcttggagcgaacgacctacaccgaactgagatacctacagcgtgagctatgagaaagcgccacgcttcccgaagggagaaaggcggacaggtatccggtaagcggcagggtcggaacaggagagcgcacgagggagcttccagggggaaacgcctggtatctttatagtcctgtcgggtttcgccacctctgacttgagcgtcgatttttgtgatgctcgtcaggggggcggagcctatggaaaaacgccagcaacgcggcctttttacggttcctggccttttgctgg

SEQ ID NO: 68 - DNA, 7403 bp, Artificial
  Synthetic
agacttagggaccctgcggccgccattaattcctaatttttgttgacactctatcattgatagagttattttaccactccctatcagtgatagagaaaagtgaaatgaatagaccggccgctgagaaaaagcgaagcggcactgctctttaacaatttatcagacaatctgtgtgggcactcgaagatacggattcttaacgtcgcaagacgaaaaatgaataccaagtctcaagagtgaacacgtaattcattacgaagtttaattctttgagcgtcaaactttttaattgaagagtttgatcatggctcagattgaacgctggcggcaggcctaacacatgcaagtcgagcggcagcacagaggaacttgttccttgggtggcgagcggcggacgggtgagtaatgcctgggaaattgcccggtagagggggataaccattggaaacgatggctaataccgcataacctcgcaagagcaaagcaggggaccttcgggccttgcgctaccggatatgcccaggtgggattagctagttggtgaggtaagggctcaccaaggcgacgatccctagctggtctgagaggatgatcagccacactggaactgagacacggtccagactcctacgggaggcagcagtggggaatattgcacaatgggcgcaagcctgatgcagccatgccgcgtgtatgaagaaggccttcgggttgtaaagtactttcagtagggaggaaggtggttaagttaataccttaatcatttgacgttacctacagaagaagcaccggctaactccgtgccagcagccgcggtaatacggagggtgcaagcgttaatcggaattactgggcgtaaagcgcatgcaggtggtttgttaagtcagatgtgaaagccctgggctcaacctaggaatcgcatttgaaactgacaagctagagtactgtagaggggggtagaatttcaggtgtagcggtgaaatgcgtagagatctgaaggaataccggtggcgaaggcggccccctggacagatactgacactcagatgcgaaagcgtggggagcaaacaggattagataccctggtagtccacgccgtaaacgatgtctacttggaggttgtgacctagagtcgtggctttcggagctaacgcgttaagtagaccgcctggggagtacggtcgcaagattaaaactcaaatgaattgacgggggcccgcacaagcggtggagcatgtggtttaattcgatgcaacgcgaagaaccttacctactcttgacatccagagaatctagcggagacgctggagtgccttcgggagctctgagacaggtgctgcatggctgtcgtcagctcgtgttgtgaaatgttgggttaagtcccgcaacgagcgcaacccttatccttgtttgccagcacgtaatggtgggaactccagggagactgccggtgataaaccggaggaaggtggggacgacgtcaagtcatcatggcccttacgagtagggctacacacgtgctacaatggcgtatacagagggcagcgataccgcgaggtggagcgaatctcacaaagtacgtcgtagtccggattggagtctgcaactcgactccatgaagtcggaatcgctagtaatcgcaaatcagaatgttgcggtgaatacgttcccgggccttgtacacaccgcccgtcacaccatgggagtgggctgcaaaagaagcaggtagtttaaccttcgggaggacgcttgccactttgtggttcatgactggggtgaagtcgtaacaaggtagcgctaggggaacctggcgctggatcacctccttaccttaaagaagcgtactttgtagtgctcacacagattgtctgatagaaagtgaaaagcaaggcgtttacgcgttgggagtgaggctgaagagaataaggccgttcgctttctattaatgaaagctcaccctacacgaaaatatcacgcaacgcgtgataagcaattttcgtgtccccttcgtctagaggcccaggacaccgccctttcacggcggtaacaggggttcgaatcccctaggggacgccacttgctggtttgtgagtgaaagtcgccgaccttaatatctcaaaactcatcttcgggtgatgtttgagatatttgctctttaaaaatctggatcaagctgaaaattgaaacactgaacaacgagagttgttcgtgagtctctcaaattttcgcaacacgatgatgaatcgaaagaaacatcttcgggttgtgaggttaagtgactaagcgtacacggtggatgcctgggcagtcagaggcgatgaaggacgtactaacttgcgataagcgcagataaggcagtaagagccgtttgagtctgcgatttccgaatggggaaacccaactgcataagcagttactgttaactgaatacataggttaacagagcaaaccgggggaactgaaacatctaagtaccccgaggagaagaaatcaaccgagattccggtagtagcggcgagcgaacctggattagcccttaagcactcggtgaagtaggtgaacaagctggaaagcttggcgatacagggtgatagccccgtaaccgacgcttcatcgagcgtgaaatcgagtagggcgggacacgtgatatcctgtctgaatatggggggaccatcctccaaggctaaatactcctgactgaccgatagtgaaccagtaccgtgagggaaaggcgaaaagaacccctgtgaggggagtgaaatagaacctgaaaccgtgtacgtacaagcagtaggagcaccttcgtggtgtgactgcgtaccttttgtataatgggtcagcgacttatattcagtggcaaggttaaccgtataggggagccgtagcgaaagcgagtcttaattgggcgctcagtctctggatatagacccgaaaccgggtgatctagccatgggcaggttgaaggttgagtaacatcaactggaggaccgaaccgactaatgttgaaaaattagcggatgacttgtggctaggggtgaaaggccaatcaaactcggagatagctggttctccccgaaagctatttaggtagcgcctcggacgaatactactgggggtagagcactgttaaggctagggggtcatcccgacttaccaaccctttgcaaactccgaataccagtaagtactatccgggagacacacggcgggtgctaacgtccgtcgtggagagggaaacaacccagaccgccagctaaggtcccaaagtattgctaagtgggaaacgatgtgggaaggctcagacagctaggatgttggcttagaagcagccatcatttaaagaaagcgtaatagctcactagtcgagtcggcctgcgcggaagatgtaacggggctaagcaatacaccgaagctgcggcaatgtcttttagatattgggtaggggagcgttctgtaagccgttgaaggtgaatcgtaaggtttgctggaggtatcagaagtgcgaatgctgacatgagtaacgacaaagggggtgaaaaacctcctcgccggaagaccaagggttcctgtccaacgttaatcggggcagggtgagtcgacccctaaggtgaggccgaaaggcgtaatcgatgggaaacgggttaatattcccgtacttctgactattgcgatggggggacggagaaggctaggtgggccaggcgacggttgtcctggttcaagtgcgtaggcttgagagttaggtaaatccggctctctttaaggctgagacacgacgtcgagctgctacggcagtgaagtcattgatgccatgcttccaggaaaagcctctaagcttcagatagtcaggaatcgtaccccaaaccgacacaggtggtcgggtagagaataccaaggcgcttgagagaactcgggtgaaggaactaggcaaaatggtaccgtaacttcgggagaaggtacgctcttgatggtgaagtccctcgcggatggagctgacgagagtcgcagataccaggtggctgcaactgtttattaaaaacacagcactgtgcaaaatcgcaagatgacgtatacggtgtgacgcctgcccggtgccggaaggttaattgatggggttagcgcaagcgaagctcttgatcgaagccccggtaaacggcggccgtaactataacggtcctaaggtagcgaaattccttgtcgggtaagttccgacctgcacgaatggcgtaatgatggccacgctgtctccacccgagactcagtgaaattgaaatcgctgtgaagatgcagtgtacccgcggctagacggaaagaccccgtgaacctttactacagcttggcactgaacattgaacctacatgtgtaggataggtgggagtctatgaagacgtgacgccagttgcgttggagccgtccttgaaataccacccttgtatgtttgatgttctaacgttggcccctaatcggggttgcggacagtgcctggtgggtagtttgactggggcggtctcctcccaaagagtaacggaggagcacgaaggtgggctaatcacggttggacatcgtgaggttagtgcaatggcataagcccgcttaactgcgagaatgacggttcgagcaggtgcgaaagcaggtcatagtgatccggtggttctgtatggaagggccatcgctcaacggataaaaggtactccggggataacaggctgataccgcccaagagttcatatcgacggcggtgtttggcacctcgatgtcggctcatcacatcctggggctgaagtcggtcccaagggtatggctgttcgccatttaaagtggtacgcgagctgggtttagaacgtcgtgagacagttcggtccctatctgccgtgggcgttggaagattgaagggggctgctcctagtacgagaggaccggagtggacgaacctctggtgttcgggttgtgtcgccagacgcattgcccggtagctaagttcggaattgataagcgctgaaagcatctaagcgcgaagcgagccctgagatgagtcttccctgacggtttaaccgtcctaaagggttgttcgagactagaacgttgataggcagggtgtgtaagcgttgtgaggcgttgagctaacctgtactaattgcccgtgaggcttaaccatacaacgccgaagctgttttggcggatgagagaagattttcagcctgatacagattaaatcagaacgcagaagcggtctgataaaacagaattttgcttggcgaccatagcgttttggacccacctgactccatcccgaactcagaagtgaaacgaaacagcgtcgatggtagtgtggggtctccccatgtgagagtagaacatcgccaggcttcaaataaaacgaaaggctcagtcgaaagactgggcctttcgttttatctgttgtttgtcggtgaacgctctcctgagtaggacaaatccgccgggagcggatttgaacgttgcgaagcaacggcccggagggtggcgggcaggacgcccgccataaactgccaggcatcaaattaagcagaaggccatcctgacggatggcctttttgcgtttctacaaactcttcctgtcgtcatatctacaagccggcgcgccgggaaatgtgcgcggaacccctatttgtttatttttctaaatacattcaaatatgtatccgctcatgagacaataaccctgataaatgcttcaataatattgaaaaaggaagagtatgagtattcaacatttccgtgtcgcccttattcccttttttgcggcattttgccttcctgtttttgctcacccagaaacgctggtgaaagtaaaagatgctgaagatcagttgggtgcacgagtgggttacatcgaactggatctcaacagcggtaagatccttgagagttttcgccccgaagaacgttttccaatgatgagcacttttaaagttctgctatgtggcgcggtattatcccgtgttgacgccgggcaagagcaactcggtcgccgcatacactattctcagaatgacttggttgagtactcaccagtcacagaaaagcatcttacggatggcatgacagtaagagaattatgcagtgctgcaataaccatgagtgataacactgcggccaacttacttctgacaacgatcggaggaccgaaggagctaaccgcttttttgcacaacatgggggatcatgtaactcgccttgatcgttgggaaccggagctgaatgaagccataccaaacgacgagcgtgacaccacgatgcctgcagcaatggcaacaacgttgcgcaaactattaactggcgaactacttactctagcttcccggcaacaattaatagactggatggaggcggataaagttgcaggaccacttctgcgctcggcccttccggctagctggtttattgctgataaatctggagccggtgagcgtgggtctcgcggtatcattgcagcactggggccagatggtaagccctcccgtatcgtagttatctacacgacggggagtcaggcaactatggatgaacgaaatagacagatcgctgagataggtgcctcactgattaagcattggtaactgcagaccaagtttactcatatatactttagattgatttaaaacttcatttttaatttaaaaggatctaggtgaagatcctttttgataatctcatgaccaaaatcccttaacgtgagttttcgttccactgagcgtcagaccccgtagaaaagatcaaaggatcttcttgagatcctttttttctgcgcgtaatctgctgcttgcaaacaaaaaaaccaccgctaccagcggtggtttgtttgccggatcaagagctaccaactctttttccgaaggtaactggcttcagcagagcgcagataccaaatactgtccttctagtgtagccgtagttaggccaccacttcaagaactctgtagcaccgcctacatacctcgctctgctaatcctgttaccagtggctgctgccagtggcgataagtcgtgtcttaccgggttggactcaagacgatagttaccggataaggcgcagcggtcgggctgaacggggggttcgtgcacacagcccagcttggagcgaacgacctacaccgaactgagatacctacagcgtgagctatgagaaagcgccacgcttcccgaagggagaaaggcggacaggtatccggtaagcggcagggtcggaacaggagagcgcacgagggagcttccagggggaaacgcctggtatctttatagtcctgtcgggtttcgccacctctgacttgagcgtcgatttttgtgatgctcgtcaggggggcggagcctatggaaaaacgccagcaacgcggcctttttacggttcctggccttttgctgg

SEQ ID NO: 69 - DNA, 7507 bp, Artificial
  Synthetic
agacttagggaccctgcggccgccattaattcctaatttttgttgacactctatcattgatagagttattttaccactccctatcagtgatagagaaaagtgaaatgaatagaccggccgctgagaaaaagcgaagcggccactcgttgatgataatcaaaaaagatttatcaatgaactgagtgaccatttgaatgagcaatcattcagcacagtcaattcactatcgaaagatagtatcagtattcattgagccgaagcgaaagcttcacaaaacttttaattgaagagtttgatcatggctcagattgaacgctggcggcaggcctaacacatgcaagtcgagcggcagcacagaggaacttgttccttgggtggcgagcggcggacgggtgagtaatgcctgggaaattgcccggtagagggggataaccattggaaacgatggctaataccgcataacctcgcaagagcaaagcaggggaccttcgggccttgcgctaccggatatgcccaggtgggattagctagttggtgaggtaagggctcaccaaggcgacgatccctagctggtctgagaggatgatcagccacactggaactgagacacggtccagactcctacgggaggcagcagtggggaatattgcacaatgggcgcaagcctgatgcagccatgccgcgtgtatgaagaaggccttcgggttgtaaagtactttcagtagggaggaaggtggttaagttaataccttaatcatttgacgttacctacagaagaagcaccggctaactccgtgccagcagccgcggtaatacggagggtgcaagcgttaatcggaattactgggcgtaaagcgcatgcaggtggtttgttaagtcagatgtgaaagccctgggctcaacctaggaatcgcatttgaaactgacaagctagagtactgtagaggggggtagaatttcaggtgtagcggtgaaatgcgtagagatctgaaggaataccggtggcgaaggcggccccctggacagatactgacactcagatgcgaaagcgtggggagcaaacaggattagataccctggtagtccacgccgtaaacgatgtctacttggaggttgtgacctagagtcgtggctttcggagctaacgcgttaagtagaccgcctggggagtacggtcgcaagattaaaactcaaatgaattgacgggggcccgcacaagcggtggagcatgtggtttaattcgatgcaacgcgaagaaccttacctactcttgacatccagagaatctagcggagacgctggagtgccttcgggagctctgagacaggtgctgcatggctgtcgtcagctcgtgttgtgaaatgttgggttaagtcccgcaacgagcgcaacccttatccttgtttgccagcacgtaatggtgggaactccagggagactgccggtgataaaccggaggaaggtggggacgacgtcaagtcatcatggcccttacgagtagggctacacacgtgctacaatggcgtatacagagggcagcgataccgcgaggtggagcgaatctcacaaagtacgtcgtagtccggattggagtctgcaactcgactccatgaagtcggaatcgctagtaatcgcaaatcagaatgttgcggtgaatacgttcccgggccttgtacacaccgcccgtcacaccatgggagtgggctgcaaaagaagcaggtagtttaaccttcgggaggacgcttgccactttgtggttcatgactggggtgaagtcgtaacaaggtagcgctaggggaacctggcgctggatcatgtggttacacgatggttatcgtgatgagtgtccacacagattgattcggtttagatttgagcattaagtgggtctgtagctcaggtggttagagcgtacgcctgataagcgtaaggtcggtggttcgagtccactcagacccaccactaacgatggggttatagctcagctgggagagcgcctgccttgcacgcaggaggtctgcggttcgatcccgcataactccaccatctttaagcgttttcgctgagaatgtttaaaaatggttttcatcagaaaatcttgctctttaacaatttggaaagctgacaaaacaacaatttattgttgtttgtaaagttctcaatgtttatcgaaagataaacaccaacaacacattcaagtgtgcttggtatcgaataagacttcggtcttgttcaaatttgagtccggcaaaatctgtctcgcactcatgtaaattaaacgcgagacaacttaggttgtttaaacaacaacccgaaactccttcgggttgtatggttaagtgactaagcgtacacggtggatgcctgggcagtcagaggcgatgaaggacgtactaacttgcgataagcgcagataaggcagtaagagccgtttgagtctgcgatttccgaatggggaaacccaactgcataagcagttactgttaactgaatacataggttaacagagcaaaccgggggaactgaaacatctaagtaccccgaggagaagaaatcaaccgagattccggtagtagcggcgagcgaacctggattagcccttaagcactcggtgaagtaggtgaacaagctggaaagcttggcgatacagggtgatagccccgtaaccgacgcttcatcgagcgtgaaatcgagtagggcgggacacgtgatatcctgtctgaatatggggggaccatcctccaaggctaaatactcctgactgaccgatagtgaaccagtaccgtgagggaaaggcgaaaagaacccctgtgaggggagtgaaatagaacctgaaaccgtgtacgtacaagcagtaggagcaccttcgtggtgtgactgcgtaccttttgtataatgggtcagcgacttatattcagtggcaaggttaaccgtataggggagccgtagcgaaagcgagtcttaattgggcgctcagtctctggatatagacccgaaaccgggtgatctagccatgggcaggttgaaggttgagtaacatcaactggaggaccgaaccgactaatgttgaaaaattagcggatgacttgtggctaggggtgaaaggccaatcaaactcggagatagctggttctccccgaaagctatttaggtagcgcctcggacgaatactactgggggtagagcactgttaaggctagggggtcatcccgacttaccaaccctttgcaaactccgaataccagtaagtactatccgggagacacacggcgggtgctaacgtccgtcgtggagagggaaacaacccagaccgccagctaaggtcccaaagtattgctaagtgggaaacgatgtgggaaggctcagacagctaggatgttggcttagaagcagccatcatttaaagaaagcgtaatagctcactagtcgagtcggcctgcgcggaagatgtaacggggctaagcaatacaccgaagctgcggcaatgtcttttagatattgggtaggggagcgttctgtaagccgttgaaggtgaatcgtaaggtttgctggaggtatcagaagtgcgaatgctgacatgagtaacgacaaagggggtgaaaaacctcctcgccggaagaccaagggttcctgtccaacgttaatcggggcagggtgagtcgacccctaaggtgaggccgaaaggcgtaatcgatgggaaacgggttaatattcccgtacttctgactattgcgatggggggacggagaaggctaggtgggccaggcgacggttgtcctggttcaagtgcgtaggcttgagagttaggtaaatccggctctctttaaggctgagacacgacgtcgagctgctacggcagtgaagtcattgatgccatgcttccaggaaaagcctctaagcttcagatagtcaggaatcgtaccccaaaccgacacaggtggtcgggtagagaataccaaggcgcttgagagaactcgggtgaaggaactaggcaaaatggtaccgtaacttcgggagaaggtacgctcttgatggtgaagtccctcgcggatggagctgacgagagtcgcagataccaggtggctgcaactgtttattaaaaacacagcactgtgcaaaatcgcaagatgacgtatacggtgtgacgcctgcccggtgccggaaggttaattgatggggttagcgcaagcgaagctcttgatcgaagccccggtaaacggcggccgtaactataacggtcctaaggtagcgaaattccttgtcgggtaagttccgacctgcacgaatggcgtaatgatggccacgctgtctccacccgagactcagtgaaattgaaatcgctgtgaagatgcagtgtacccgcggctagacggaaagaccccgtgaacctttactacagcttggcactgaacattgaacctacatgtgtaggataggtgggagtctatgaagacgtgacgccagttgcgttggagccgtccttgaaataccacccttgtatgtttgatgttctaacgttggcccctaatcggggttgcggacagtgcctggtgggtagtttgactggggcggtctcctcccaaagagtaacggaggagcacgaaggtgggctaatcacggttggacatcgtgaggttagtgcaatggcataagcccgcttaactgcgagaatgacggttcgagcaggtgcgaaagcaggtcatagtgatccggtggttctgtatggaagggccatcgctcaacggataaaaggtactccggggataacaggctgataccgcccaagagttcatatcgacggcggtgtttggcacctcgatgtcggctcatcacatcctggggctgaagtcggtcccaagggtatggctgttcgccatttaaagtggtacgcgagctgggtttagaacgtcgtgagacagttcggtccctatctgccgtgggcgttggaagattgaagggggctgctcctagtacgagaggaccggagtggacgaacctctggtgttcgggttgtgtcgccagacgcattgcccggtagctaagttcggaattgataagcgctgaaagcatctaagcgcgaagcgagccctgagatgagtcttccctgacggtttaaccgtcctaaagggttgttcgagactagaacgttgataggcagggtgtgtaagcgttgtgaggcgttgagctaacctgtactaattgcccgtgaggcttaaccatacaacacccaaggggttttgtagtggactcaaagctgagcgcataagaatgtgttgagagaatgaaaacagctttccagaattgttggttatcactttttaagaaaaagtgaaatcaaaaacagaatttgcttggcgaccatagcgttttggacccacctgactccatcccgaactcagaagtgaaacgaaacagcgtcgatggtagtgtggggtctccccatgtgagagtagaacatcgccaggcttttaatctcgctgatagtgtcaccacgctacacgctattagcacacaatttgcggagagatggctgagtggttgaaagcaccggtcttgaaaaccggcgatggttaatagctatcctagggttcaaatccctatctctccgccactattaagaaaggccgctgataactcagcggcctttttgcattctgtcattttgattttcaatatctaggttatcgatacagtaccgataacctattcttctaaagttctgcgcgccgggaaatgtgcgcggaacccctatttgtttatttttctaaatacattcaaatatgtatccgctcatgagacaataaccctgataaatgcttcaataatattgaaaaaggaagagtatgagtattcaacatttccgtgtcgcccttattcccttttttgcggcattttgccttcctgtttttgctcacccagaaacgctggtgaaagtaaaagatgctgaagatcagttgggtgcacgagtgggttacatcgaactggatctcaacagcggtaagatccttgagagttttcgccccgaagaacgttttccaatgatgagcacttttaaagttctgctatgtggcgcggtattatcccgtgttgacgccgggcaagagcaactcggtcgccgcatacactattctcagaatgacttggttgagtactcaccagtcacagaaaagcatcttacggatggcatgacagtaagagaattatgcagtgctgcaataaccatgagtgataacactgcggccaacttacttctgacaacgatcggaggaccgaaggagctaaccgcttttttgcacaacatgggggatcatgtaactcgccttgatcgttgggaaccggagctgaatgaagccataccaaacgacgagcgtgacaccacgatgcctgcagcaatggcaacaacgttgcgcaaactattaactggcgaactacttactctagcttcccggcaacaattaatagactggatggaggcggataaagttgcaggaccacttctgcgctcggcccttccggctagctggtttattgctgataaatctggagccggtgagcgtgggtctcgcggtatcattgcagcactggggccagatggtaagccctcccgtatcgtagttatctacacgacggggagtcaggcaactatggatgaacgaaatagacagatcgctgagataggtgcctcactgattaagcattggtaactgcagaccaagtttactcatatatactttagattgatttaaaacttcatttttaatttaaaaggatctaggtgaagatcctttttgataatctcatgaccaaaatcccttaacgtgagttttcgttccactgagcgtcagaccccgtagaaaagatcaaaggatcttcttgagatcctttttttctgcgcgtaatctgctgcttgcaaacaaaaaaaccaccgctaccagcggtggtttgtttgccggatcaagagctaccaactctttttccgaaggtaactggcttcagcagagcgcagataccaaatactgtccttctagtgtagccgtagttaggccaccacttcaagaactctgtagcaccgcctacatacctcgctctgctaatcctgttaccagtggctgctgccagtggcgataagtcgtgtcttaccgggttggactcaagacgatagttaccggataaggcgcagcggtcgggctgaacggggggttcgtgcacacagcccagcttggagcgaacgacctacaccgaactgagatacctacagcgtgagctatgagaaagcgccacgcttcccgaagggagaaaggcggacaggtatccggtaagcggcagggtcggaacaggagagcgcacgagggagcttccagggggaaacgcctggtatctttatagtcctgtcgggtttcgccacctctgacttgagcgtcgatttttgtgatgctcgtcaggggggcggagcctatggaaaaacgccagcaacgcggcctttttacggttcctggccttttgctgg

SEQ ID NO: 70 - DNA, 7436 bp, Artificial
  Synthetic
agacttagggaccctgcggccgccattaattcctaatttttgttgacactctatcattgatagagttattttaccactccctatcagtgatagagaaaagtgaaatgaatagaccggccgctgagaaaaagcgaagcggcccgatgtaaaatgcgcacctcactcgaacagggtgagtcactaagaagcaacggcttcgagtgaatgttctttaaaaatttagacaagacaatctgtgtgggcactcgttaagagtgtcacaacgacgattcatatttcgatatatttaattgaagagtttgatcatggctcagattgaacgctggcggcaggcctaacacatgcaagtcgaacggtaacatttctagcttgctagaagatgacgagtggcggacgggtgagtaatgcttgggaacttgcctttgcgagggggataacagttggaaacgactgctaataccgcataatgtcttcggaccaaacggggcttaggctccggcgcaaagagaggcccaagtgagattagctagttggtaaggtaacggcttaccaaggcgacgatctctagctgttctgagaggaagatcagccacactgggactgagacacggcccagactcctacgggaggcagcagtggggaatattgcacaatgggggaaaccctgatgcagccatgccgcgtgtgtgaagaaggccttcgggttgtaaagcactttcagttgtgaggaaaagttagtagttaatacctgctagccgtgacgttaacaacagaagaagcaccggctaactccgtgccagcagccgcggtaatacggagggtgcgagcgttaatcggaattactgggcgtaaagcgcacgcaggcggtttgttaagctagatgtgaaagccccgggctcaacctgggatggtcatttagaactggcagactagagtcttggagaggggagtggaattccaggtgtagcggtgaaatgcgtagatatctggaggaacatcagtggcgaaggcgactccctggccaaagactgacgctcatgtgcgaaagtgtgggtagcgaacaggattagataccctggtagtccacaccgtaaacgctgtctactagctgtgtgtgtctttaagacgtgcgtagcgaagctaacgcgctaagtagaccgcctggggagtacggccgcaaggttaaaactcaaatgaattgacgggggcccgcacaagcggtggagcatgtggtttaattcgatgcaacgcgaagaaccttacctacacttgacatgctgagaagttactagagatagtttcgtgccttcgggaactcagacacaggtgctgcatggctgtcgtcagctcgtgtcgtgagatgttgggttaagtcccgcaacgagcgcaacccttgtccttagttgccagccttaagttgggcactctaaggagactgccggtgacaaaccggaggaaggtggggacgacgtcaagtcatcatggcccttacgtgtagggctacacacgtgctacaatggcatttacagagggaagcgagacagtgatgtggagcggaccccttaaagaatgtcgtagtccggattggagtctgcaactcgactccatgaagtcggaatcgctagtaatcgcaggtcagaatactgcggtgaatacgttcccgggccttgtacacaccgcccgtcacaccatgggagtgggatgcaaaagaagtagttagtctaaccttcgggaggacgattaccactttgtgtttcatgactggggtgaagtcgtaacaaggtaaccctaggggaacctggggttggatcacctccttaccattacgtcgaaaagacgccttgatgcagtgcctacacagatagtcttgtttaaaacgaagaacgacacaagtttatggggctatagctcagctgggagagcgcctgatttgcattcaggaggtcagcagttcgatcctgcttagctccaccatctacttgaaactgggtttgttgctaacaaacttagaaactgaaggcttgtagctcagctggttagagcgcacccctgataagggtgaggtcggcagttcaagtctgcccaagcctaccatttccttgctttaagaaaggaaggtaacaaaggtagaaacgtgtcacgttggacccgaaatcctaatgaatatttactgtttcagtaagcattgattagggttttttactctaaagatgaaagtactgcttttgcaggaaacatcgaatgttctttaacaatttggaaagctgatattaatagtaatcaatcaaaattgagtaactgagaaatcgaaagatgactttttactctacttgactgaattgcttgttatcaatcgatgatttgatagcaaggcaattcttccgattagcttgtcattcatgcaacgtaacttggacagaagtcaaaaggctgtttggggttgtatggttaagtgacaaagcgtatacggtggatgccttggcagttagaggcgatgaaggacgtgtaagtctgcgaaaagctgtggtgagccgacaaaatgcatttgagccacagatgtccgaatggggaaacccacctatttataggtatcgttaactgaatacataggttaacgaggcaaacgaggggaactgaaacatctaagtacccttaggaaaagaaatcaaccgagattcccctagtagcggcgagcgaacggggagcagcccttaagctgtttagaatttagtggaatcctttgggaagaggagcgatacaaggtgatagccctgtacacgacggattctttacagtgaaatcgagtaggtcgggacacgtgttatcttgactgaatatggggggaccatcctccaaggctaaatactcctaactgaccgatagtgaaccagtaccgtgagggaaaggcgaaaagaacccctgtgaggggagtgaaatagaacctgaaaccgtatacgtacaagcagtgggagcccttcggggtgactgcgtaccttttgtataatgggtcagcgacttatatttagtagcaaggttaagtgaataacggagccgtagcgaaagcgagtgttaactgcgcgtttagttgctaggtatagacccgaaacccggtgatctagccatgagcaggttgaaggttgagtaacatcaactggaggaccgaacccactaacgttgaaaagttaggggatgacttgtggctgggggtgaaaggccaatcaaaccgggagatagctggttctccccgaaatctatttaggtagagcctcggacgaattccattgggggtagagcactgttaaggctagggggtcatcccgacttaccaaccctttgcaaactccgaataccaatgagaactatccgggagacacacggcgggtgctaacgtccgtcgtggagagggaaacaacccagaccgccagctaaggtcccaaaatattgctaagtgggaaacgatgtgggaaggcatagacagctaggaggttggcttagaagcagccaccctttaaagaaagcgtaatagctcactagtcgagtcggcctgcgcggaagatgtaacggggctaagcaatataccgaagctgcggcagcatgtttacatgctgggtaggggagcgttgtgtaagtggatgaaggtgagttgtaaagcttgctggacatatcacaagtgcgaatgctgacatgagtaacgataatgggagtgaaaaactcccacgccggaagaccaaggtttcctgtcccatgctaatcagggcagggtaagtcggcccctaaggcgaggcagaaatgcgtagtcgatgggaaacgggttaatattcccgtacttatataatcagtgatggagggacggagaaggctaggcaagcttggcgttggttgtccaagtgaaagtgagtaggctgaagacttaggtaaatccgggttttcaaggccgagacacgagacgagctcccaagggagtgaagttgttgatgccctgcttccaggaaaagcttctaaacttatgattatatgaaccgtaccccaaaccgacacaggtggtcaggtagagaatactaaggcgcttgagagaactcgggtgaaggaactcggcaaaattgtaccgtaacttcgggagaaggtacgcctctgtttgtgaacacttcgcgtggtaagcaaatggaggccgcagtgaccaggtggctgggactgtttattaaaaacacagcactctgcaaactcgtaagaggacgtatagggtgtgacacctgcccggtgccggaaggttaattgatggggttagttttcggacgaagctcttgatcgaagccccggtaaacggcggccgtaactataacggtcctaaggtagcgaaattccttgtcgggtaagttccgacctgcacgaatggtgtaaccatggccacgctgtctccacccgagactcagtgaaattgaaatcgcagtgaagatgctgtgtacccgcacctagacggaaagaccccgtgaacctttactacagcttggcactgaacattgaacctacatgtgtaggataggtgggaggctttgaagcacagtcgctagattgtgtggagccgtccttgaaataccacccttgtatgtttgatgttctaacattgttcccttatcgggaatgtggacagtgtctggtgggtagtttgactggggcggtctcctcccaaatagtaacggaggagcacgaaggttagctaatcacggtcggacatcgtgaggttagtgcaatggcataagctagcttaactgcgagacagacacgtcgagcaggtacgaaagtaggtcatagtgatccggtggttctgtatggaagggccatcgctcaacggataaaaggtactccggggataacaggctgataccgcccaagagttcatatcgacggcggtgtttggcacctcgatgtcggctcatcacatcctggggctgaagtcggtcccaagggtatggctgttcgccatttaaagtggtacgcgagctgggtttagaacgtcgtgagacagttcggtccctatctggtgtgggcgttggatgattgatgggagctgctcctagtacgagaggaccggagtggacgaaccgctggtgttcgggttgtcatgccaatggcattgcccggtagctatgttcggaacggataaccgctgaaagcatctaagcgggaagccggcccaaagatgagtcatccctgacctttaaggtctggaagggttgttatagacgatgacgttgataggcagggtgtggaagcgttgtaaggcgttaagctaacctgtactaattgcccgagaggcttaaccatacaacgcccaagaagctttaggcttctgagtgttgtagacaagctaagctctgaaaaatgagcaaaaagtagagtgaaaagtagttactcactgattgaattgatatccagttttctagattgttaccagtttttcctggcagccatagcgatacggtaccacctgactccattccgaactcagaagtgaaacgtattagcgccgatggtagtgtggggcttccccatgtgagagtaggacactgccaggtcccattaagaagaacccgcctaacggcgggttttttgctttccgcagaaagaaaaataaaggggtcagagtacttttgcgcgccgggaaatgtgcgcggaacccctatttgtttatttttctaaatacattcaaatatgtatccgctcatgagacaataaccctgataaatgcttcaataatattgaaaaaggaagagtatgagtattcaacatttccgtgtcgcccttattcccttttttgcggcattttgccttcctgtttttgctcacccagaaacgctggtgaaagtaaaagatgctgaagatcagttgggtgcacgagtgggttacatcgaactggatctcaacagcggtaagatccttgagagttttcgccccgaagaacgttttccaatgatgagcacttttaaagttctgctatgtggcgcggtattatcccgtgttgacgccgggcaagagcaactcggtcgccgcatacactattctcagaatgacttggttgagtactcaccagtcacagaaaagcatcttacggatggcatgacagtaagagaattatgcagtgctgcaataaccatgagtgataacactgcggccaacttacttctgacaacgatcggaggaccgaaggagctaaccgcttttttgcacaacatgggggatcatgtaactcgccttgatcgttgggaaccggagctgaatgaagccataccaaacgacgagcgtgacaccacgatgcctgcagcaatggcaacaacgttgcgcaaactattaactggcgaactacttactctagcttcccggcaacaattaatagactggatggaggcggataaagttgcaggaccacttctgcgctcggcccttccggctagctggtttattgctgataaatctggagccggtgagcgtgggtctcgcggtatcattgcagcactggggccagatggtaagccctcccgtatcgtagttatctacacgacggggagtcaggcaactatggatgaacgaaatagacagatcgctgagataggtgcctcactgattaagcattggtaactgcagaccaagtttactcatatatactttagattgatttaaaacttcatttttaatttaaaaggatctaggtgaagatcctttttgataatctcatgaccaaaatcccttaacgtgagttttcgttccactgagcgtcagaccccgtagaaaagatcaaaggatcttcttgagatcctttttttctgcgcgtaatctgctgcttgcaaacaaaaaaaccaccgctaccagcggtggtttgtttgccggatcaagagctaccaactctttttccgaaggtaactggcttcagcagagcgcagataccaaatactgtccttctagtgtagccgtagttaggccaccacttcaagaactctgtagcaccgcctacatacctcgctctgctaatcctgttaccagtggctgctgccagtggcgataagtcgtgtcttaccgggttggactcaagacgatagttaccggataaggcgcagcggtcgggctgaacggggggttcgtgcacacagcccagcttggagcgaacgacctacaccgaactgagatacctacagcgtgagctatgagaaagcgccacgcttcccgaagggagaaaggcggacaggtatccggtaagcggcagggtcggaacaggagagcgcacgagggagcttccagggggaaacgcctggtatctttatagtcctgtcgggtttcgccacctctgacttgagcgtcgatttttgtgatgctcgtcaggggggcggagcctatggaaaaacgccagcaacgcggcctttttacggttcctggccttttgctgg

SEQ ID NO: 71 - DNA, 7380 bp, Artificial
  Synthetic
agacttagggaccctgcggccgccattaattcctaatttttgttgacactctatcattgatagagttattttaccactccctatcagtgatagagaaaagtgaaatgaatagaccggccgctgagaaaaagcgaagcggcactgctctttaacaatttatcagacaatctgtgtgggcactcgaagatacggattcttaacgtcgcaagacgaaaaatgaataccaagtctcaagagtgaacacgtaattcattacgaagtttaattctttgagcgtcaaactttttaattgaagagtttgatcatggctcagattgaacgctggcggcaggcctaacacatgcaagtcgaacggtaacatttctagcttgctagaagatgacgagtggcggacgggtgagtaatgcttgggaacttgcctttgcgagggggataacagttggaaacgactgctaataccgcataatgtcttcggaccaaacggggcttaggctccggcgcaaagagaggcccaagtgagattagctagttggtaaggtaacggcttaccaaggcgacgatctctagctgttctgagaggaagatcagccacactgggactgagacacggcccagactcctacgggaggcagcagtggggaatattgcacaatgggggaaaccctgatgcagccatgccgcgtgtgtgaagaaggccttcgggttgtaaagcactttcagttgtgaggaaaagttagtagttaatacctgctagccgtgacgttaacaacagaagaagcaccggctaactccgtgccagcagccgcggtaatacggagggtgcgagcgttaatcggaattactgggcgtaaagcgcacgcaggcggtttgttaagctagatgtgaaagccccgggctcaacctgggatggtcatttagaactggcagactagagtcttggagaggggagtggaattccaggtgtagcggtgaaatgcgtagatatctggaggaacatcagtggcgaaggcgactccctggccaaagactgacgctcatgtgcgaaagtgtgggtagcgaacaggattagataccctggtagtccacaccgtaaacgctgtctactagctgtgtgtgtctttaagacgtgcgtagcgaagctaacgcgctaagtagaccgcctggggagtacggccgcaaggttaaaactcaaatgaattgacgggggcccgcacaagcggtggagcatgtggtttaattcgatgcaacgcgaagaaccttacctacacttgacatgctgagaagttactagagatagtttcgtgccttcgggaactcagacacaggtgctgcatggctgtcgtcagctcgtgtcgtgagatgttgggttaagtcccgcaacgagcgcaacccttgtccttagttgccagccttaagttgggcactctaaggagactgccggtgacaaaccggaggaaggtggggacgacgtcaagtcatcatggcccttacgtgtagggctacacacgtgctacaatggcatttacagagggaagcgagacagtgatgtggagcggaccccttaaagaatgtcgtagtccggattggagtctgcaactcgactccatgaagtcggaatcgctagtaatcgcaggtcagaatactgcggtgaatacgttcccgggccttgtacacaccgcccgtcacaccatgggagtgggatgcaaaagaagtagttagtctaaccttcgggaggacgattaccactttgtgtttcatgactggggtgaagtcgtaacaaggtaaccctaggggaacctggggttggatcacctccttaccttaaagaagcgtactttgtagtgctcacacagattgtctgatagaaagtgaaaagcaaggcgtttacgcgttgggagtgaggctgaagagaataaggccgttcgctttctattaatgaaagctcaccctacacgaaaatatcacgcaacgcgtgataagcaattttcgtgtccccttcgtctagaggcccaggacaccgccctttcacggcggtaacaggggttcgaatcccctaggggacgccacttgctggtttgtgagtgaaagtcgccgaccttaatatctcaaaactcatcttcgggtgatgtttgagatatttgctctttaaaaatctggatcaagctgaaaattgaaacactgaacaacgagagttgttcgtgagtctctcaaattttcgcaacacgatgatgaatcgaaagaaacatcttcgggttgtgaggttaagtgacaaagcgtatacggtggatgccttggcagttagaggcgatgaaggacgtgtaagtctgcgaaaagctgtggtgagccgacaaaatgcatttgagccacagatgtccgaatggggaaacccacctatttataggtatcgttaactgaatacataggttaacgaggcaaacgaggggaactgaaacatctaagtacccttaggaaaagaaatcaaccgagattcccctagtagcggcgagcgaacggggagcagcccttaagctgtttagaatttagtggaatcctttgggaagaggagcgatacaaggtgatagccctgtacacgacggattctttacagtgaaatcgagtaggtcgggacacgtgttatcttgactgaatatggggggaccatcctccaaggctaaatactcctaactgaccgatagtgaaccagtaccgtgagggaaaggcgaaaagaacccctgtgaggggagtgaaatagaacctgaaaccgtatacgtacaagcagtgggagcccttcggggtgactgcgtaccttttgtataatgggtcagcgacttatatttagtagcaaggttaagtgaataacggagccgtagcgaaagcgagtgttaactgcgcgtttagttgctaggtatagacccgaaacccggtgatctagccatgagcaggttgaaggttgagtaacatcaactggaggaccgaacccactaacgttgaaaagttaggggatgacttgtggctgggggtgaaaggccaatcaaaccgggagatagctggttctccccgaaatctatttaggtagagcctcggacgaattccattgggggtagagcactgttaaggctagggggtcatcccgacttaccaaccctttgcaaactccgaataccaatgagaactatccgggagacacacggcgggtgctaacgtccgtcgtggagagggaaacaacccagaccgccagctaaggtcccaaaatattgctaagtgggaaacgatgtgggaaggcatagacagctaggaggttggcttagaagcagccaccctttaaagaaagcgtaatagctcactagtcgagtcggcctgcgcggaagatgtaacggggctaagcaatataccgaagctgcggcagcatgtttacatgctgggtaggggagcgttgtgtaagtggatgaaggtgagttgtaaagcttgctggacatatcacaagtgcgaatgctgacatgagtaacgataatgggagtgaaaaactcccacgccggaagaccaaggtttcctgtcccatgctaatcagggcagggtaagtcggcccctaaggcgaggcagaaatgcgtagtcgatgggaaacgggttaatattcccgtacttatataatcagtgatggagggacggagaaggctaggcaagcttggcgttggttgtccaagtgaaagtgagtaggctgaagacttaggtaaatccgggttttcaaggccgagacacgagacgagctcccaagggagtgaagttgttgatgccctgcttccaggaaaagcttctaaacttatgattatatgaaccgtaccccaaaccgacacaggtggtcaggtagagaatactaaggcgcttgagagaactcgggtgaaggaactcggcaaaattgtaccgtaacttcgggagaaggtacgcctctgtttgtgaacacttcgcgtggtaagcaaatggaggccgcagtgaccaggtggctgggactgtttattaaaaacacagcactctgcaaactcgtaagaggacgtatagggtgtgacacctgcccggtgccggaaggttaattgatggggttagttttcggacgaagctcttgatcgaagccccggtaaacggcggccgtaactataacggtcctaaggtagcgaaattccttgtcgggtaagttccgacctgcacgaatggtgtaaccatggccacgctgtctccacccgagactcagtgaaattgaaatcgcagtgaagatgctgtgtacccgcacctagacggaaagaccccgtgaacctttactacagcttggcactgaacattgaacctacatgtgtaggataggtgggaggctttgaagcacagtcgctagattgtgtggagccgtccttgaaataccacccttgtatgtttgatgttctaacattgttcccttatcgggaatgtggacagtgtctggtgggtagtttgactggggcggtctcctcccaaatagtaacggaggagcacgaaggttagctaatcacggtcggacatcgtgaggttagtgcaatggcataagctagcttaactgcgagacagacacgtcgagcaggtacgaaagtaggtcatagtgatccggtggttctgtatggaagggccatcgctcaacggataaaaggtactccggggataacaggctgataccgcccaagagttcatatcgacggcggtgtttggcacctcgatgtcggctcatcacatcctggggctgaagtcggtcccaagggtatggctgttcgccatttaaagtggtacgcgagctgggtttagaacgtcgtgagacagttcggtccctatctggtgtgggcgttggatgattgatgggagctgctcctagtacgagaggaccggagtggacgaaccgctggtgttcgggttgtcatgccaatggcattgcccggtagctatgttcggaacggataaccgctgaaagcatctaagcgggaagccggcccaaagatgagtcatccctgacctttaaggtctggaagggttgttatagacgatgacgttgataggcagggtgtggaagcgttgtaaggcgttaagctaacctgtactaattgcccgagaggcttaaccatacaacgccgaagctgttttggcggatgagagaagattttcagcctgatacagattaaatcagaacgcagaagcggtctgataaaacagaatttcctggcagccatagcgatacggtaccacctgactccattccgaactcagaagtgaaacgtattagcgccgatggtagtgtggggcttccccatgtgagagtaggacactgccaggtcccaaataaaacgaaaggctcagtcgaaagactgggcctttcgttttatctgttgtttgtcggtgaacgctctcctgagtaggacaaatccgccgggagcggatttgaacgttgcgaagcaacggcccggagggtggcgggcaggacgcccgccataaactgccaggcatcaaattaagcagaaggccatcctgacggatggcctttttgcgtttctacaaactcttcctgtcgtcatatctacaagccggcgcgccgggaaatgtgcgcggaacccctatttgtttatttttctaaatacattcaaatatgtatccgctcatgagacaataaccctgataaatgcttcaataatattgaaaaaggaagagtatgagtattcaacatttccgtgtcgcccttattcccttttttgcggcattttgccttcctgtttttgctcacccagaaacgctggtgaaagtaaaagatgctgaagatcagttgggtgcacgagtgggttacatcgaactggatctcaacagcggtaagatccttgagagttttcgccccgaagaacgttttccaatgatgagcacttttaaagttctgctatgtggcgcggtattatcccgtgttgacgccgggcaagagcaactcggtcgccgcatacactattctcagaatgacttggttgagtactcaccagtcacagaaaagcatcttacggatggcatgacagtaagagaattatgcagtgctgcaataaccatgagtgataacactgcggccaacttacttctgacaacgatcggaggaccgaaggagctaaccgcttttttgcacaacatgggggatcatgtaactcgccttgatcgttgggaaccggagctgaatgaagccataccaaacgacgagcgtgacaccacgatgcctgcagcaatggcaacaacgttgcgcaaactattaactggcgaactacttactctagcttcccggcaacaattaatagactggatggaggcggataaagttgcaggaccacttctgcgctcggcccttccggctagctggtttattgctgataaatctggagccggtgagcgtgggtctcgcggtatcattgcagcactggggccagatggtaagccctcccgtatcgtagttatctacacgacggggagtcaggcaactatggatgaacgaaatagacagatcgctgagataggtgcctcactgattaagcattggtaactgcagaccaagtttactcatatatactttagattgatttaaaacttcatttttaatttaaaaggatctaggtgaagatcctttttgataatctcatgaccaaaatcccttaacgtgagttttcgttccactgagcgtcagaccccgtagaaaagatcaaaggatcttcttgagatcctttttttctgcgcgtaatctgctgcttgcaaacaaaaaaaccaccgctaccagcggtggtttgtttgccggatcaagagctaccaactctttttccgaaggtaactggcttcagcagagcgcagataccaaatactgtccttctagtgtagccgtagttaggccaccacttcaagaactctgtagcaccgcctacatacctcgctctgctaatcctgttaccagtggctgctgccagtggcgataagtcgtgtcttaccgggttggactcaagacgatagttaccggataaggcgcagcggtcgggctgaacggggggttcgtgcacacagcccagcttggagcgaacgacctacaccgaactgagatacctacagcgtgagctatgagaaagcgccacgcttcccgaagggagaaaggcggacaggtatccggtaagcggcagggtcggaacaggagagcgcacgagggagcttccagggggaaacgcctggtatctttatagtcctgtcgggtttcgccacctctgacttgagcgtcgatttttgtgatgctcgtcaggggggcggagcctatggaaaaacgccagcaacgcggcctttttacggttcctggccttttgctgg

SEQ ID NO: 72 - DNA, 7434 bp, Artificial
  Synthetic
agacttagggaccctgcggccgccattaattcctaatttttgttgacactctatcattgatagagttattttaccactccctatcagtgatagagaaaagtgaaatgaatagaccggccgctgagaaaaagcgaagcggccgatgtaaaatgcgcacctcactcgaacagggtgagtcactaagaagcaacggcttcgagtgaatgttctttaaaaatttagacaagacaatctgtgtgggcactcgttaagagtgtcacaacgacgattcatatttcgatatatttaattgaagagtttgatcatggctcagattgaacgctggcggcaggcctaacacatgcaagtcgaacggtaacatttctagcttgctagaagatgacgagtggcggacgggtgagtaatgcttgggaacttgcctttgcgagggggataacagttggaaacgactgctaataccgcataatgtcttcggaccaaacggggcttaggctccggcgcaaagagaggcccaagtgagattagctagttggtaaggtaacggcttaccaaggcgacgatctctagctgttctgagaggaagatcagccacactgggactgagacacggcccagactcctacgggaggcagcagtggggaatattgcacaatgggggaaaccctgatgcagccatgccgcgtgtgtgaagaaggccttcgggttgtaaagcactttcagttgtgaggaaaagttagtagttaatacctgctagccgtgacgttaacaacagaagaagcaccggctaactccgtgccagcagccgcggtaatacggagggtgcgagcgttaatcggaattactgggcgtaaagcgcacgcaggcggtttgttaagctagatgtgaaagccccgggctcaacctgggatggtcatttagaactggcagactagagtcttggagaggggagtggaattccaggtgtagcggtgaaatgcgtagatatctggaggaacatcagtggcgaaggcgactccctggccaaagactgacgctcatgtgcgaaagtgtgggtagcgaacaggattagataccctggtagtccacaccgtaaacgctgtctactagctgtgtgtgtctttaagacgtgcgtagcgaagctaacgcgctaagtagaccgcctggggagtacggccgcaaggttaaaactcaaatgaattgacgggggcccgcacaagcggtggagcatgtggtttaattcgatgcaacgcgaagaaccttacctacacttgacatgctgagaagttactagagatagtttcgtgccttcgggaactcagacacaggtgctgcatggctgtcgtcagctcgtgtcgtgagatgttgggttaagtcccgcaacgagcgcaacccttgtccttagttgccagccttaagttgggcactctaaggagactgccggtgacaaaccggaggaaggtggggacgacgtcaagtcatcatggcccttacgtgtagggctacacacgtgctacaatggcatttacagagggaagcgagacagtgatgtggagcggaccccttaaagaatgtcgtagtccggattggagtctgcaactcgactccatgaagtcggaatcgctagtaatcgcaggtcagaatactgcggtgaatacgttcccgggccttgtacacaccgcccgtcacaccatgggagtgggatgcaaaagaagtagttagtctaaccttcgggaggacgattaccactttgtgtttcatgactggggtgaagtcgtaacaaggtaaccctaggggaacctggggttggatcatgtggttaccattacgtcgaaagacgccttgatgcagtgcctacacagatagtcttgtttaaaacgaagaacgacacaagtttatggggctatagctcagctgggagagcgcctgatttgcattcaggaggtcagcagttcgatcctgcttagctccaccatctacttgaaactgggtttgttgctaacaaacttagaaactgaaggcttgtagctcagctggttagagcgcacccctgataagggtgaggtcggcagttcaagtctgcccaagcctaccatttccttgctttaagaaaggaaggtaacaaaggtagaaacgtgtcacgttggacccgaaatcctaatgaatatttactgtttcagtaagcattgattagggttttttactctaaagatgaaagtactgcttttgcaggaaacatcgaatgttctttaacaatttggaaagctgatattaatagtaatcaatcaaaattgagtaactgagaaatcgaaagatgactttttactctacttgactgaattgcttgttatcaatcgatgatttgatagcaaggcaattcttccgattagcttgtcattcatgcaacgtaacttggacagaagtcaaaaggctgtttggggttgtatggttaagtgacaaagcgtatacggtggatgccttggcagttagaggcgatgaaggacgtgtaagtctgcgaaaagctgtggtgagccgacaaaatgcatttgagccacagatgtccgaatggggaaacccacctatttataggtatcgttaactgaatacataggttaacgaggcaaacgaggggaactgaaacatctaagtacccttaggaaaagaaatcaaccgagattcccctagtagcggcgagcgaacggggagcagcccttaagctgtttagaatttagtggaatcctttgggaagaggagcgatacaaggtgatagccctgtacacgacggattctttacagtgaaatcgagtaggtcgggacacgtgttatcttgactgaatatggggggaccatcctccaaggctaaatactcctaactgaccgatagtgaaccagtaccgtgagggaaaggcgaaaagaacccctgtgaggggagtgaaatagaacctgaaaccgtatacgtacaagcagtgggagcccttcggggtgactgcgtaccttttgtataatgggtcagcgacttatatttagtagcaaggttaagtgaataacggagccgtagcgaaagcgagtgttaactgcgcgtttagttgctaggtatagacccgaaacccggtgatctagccatgagcaggttgaaggttgagtaacatcaactggaggaccgaacccactaacgttgaaaagttaggggatgacttgtggctgggggtgaaaggccaatcaaaccgggagatagctggttctccccgaaatctatttaggtagagcctcggacgaattccattgggggtagagcactgttaaggctagggggtcatcccgacttaccaaccctttgcaaactccgaataccaatgagaactatccgggagacacacggcgggtgctaacgtccgtcgtggagagggaaacaacccagaccgccagctaaggtcccaaaatattgctaagtgggaaacgatgtgggaaggcatagacagctaggaggttggcttagaagcagccaccctttaaagaaagcgtaatagctcactagtcgagtcggcctgcgcggaagatgtaacggggctaagcaatataccgaagctgcggcagcatgtttacatgctgggtaggggagcgttgtgtaagtggatgaaggtgagttgtaaagcttgctggacatatcacaagtgcgaatgctgacatgagtaacgataatgggagtgaaaaactcccacgccggaagaccaaggtttcctgtcccatgctaatcagggcagggtaagtcggcccctaaggcgaggcagaaatgcgtagtcgatgggaaacgggttaatattcccgtacttatataatcagtgatggagggacggagaaggctaggcaagcttggcgttggttgtccaagtgaaagtgagtaggctgaagacttaggtaaatccgggttttcaaggccgagacacgagacgagctcccaagggagtgaagttgttgatgccctgcttccaggaaaagcttctaaacttatgattatatgaaccgtaccccaaaccgacacaggtggtcaggtagagaatactaaggcgcttgagagaactcgggtgaaggaactcggcaaaattgtaccgtaacttcgggagaaggtacgcctctgtttgtgaacacttcgcgtggtaagcaaatggaggccgcagtgaccaggtggctgggactgtttattaaaaacacagcactctgcaaactcgtaagaggacgtatagggtgtgacacctgcccggtgccggaaggttaattgatggggttagttttcggacgaagctcttgatcgaagccccggtaaacggcggccgtaactataacggtcctaaggtagcgaaattccttgtcgggtaagttccgacctgcacgaatggtgtaaccatggccacgctgtctccacccgagactcagtgaaattgaaatcgcagtgaagatgctgtgtacccgcacctagacggaaagaccccgtgaacctttactacagcttggcactgaacattgaacctacatgtgtaggataggtgggaggctttgaagcacagtcgctagattgtgtggagccgtccttgaaataccacccttgtatgtttgatgttctaacattgttcccttatcgggaatgtggacagtgtctggtgggtagtttgactggggcggtctcctcccaaatagtaacggaggagcacgaaggttagctaatcacggtcggacatcgtgaggttagtgcaatggcataagctagcttaactgcgagacagacacgtcgagcaggtacgaaagtaggtcatagtgatccggtggttctgtatggaagggccatcgctcaacggataaaaggtactccggggataacaggctgataccgcccaagagttcatatcgacggcggtgtttggcacctcgatgtcggctcatcacatcctggggctgaagtcggtcccaagggtatggctgttcgccatttaaagtggtacgcgagctgggtttagaacgtcgtgagacagttcggtccctatctggtgtgggcgttggatgattgatgggagctgctcctagtacgagaggaccggagtggacgaaccgctggtgttcgggttgtcatgccaatggcattgcccggtagctatgttcggaacggataaccgctgaaagcatctaagcgggaagccggcccaaagatgagtcatccctgacctttaaggtctggaagggttgttatagacgatgacgttgataggcagggtgtggaagcgttgtaaggcgttaagctaacctgtactaattgcccgagaggcttaaccatacaacgcccaagaagctttaggcttctgagtgttgtagacaagctaagctctgaaaaatgagcaaaaagtagagtgaaaagtagttactcactgattgaattgatatccagttttctagattgttaccagtttttcctggcagccatagcgatacggtaccacctgactccattccgaactcagaagtgaaacgtattagcgccgatggtagtgtggggcttccccatgtgagagtaggacactgccaggtcccattaagaagaacccgcctaacggcgggttttttgctttccgcagaaagaaaaataaaggggtcagagtacttttgcgcgccgggaaatgtgcgcggaacccctatttgtttatttttctaaatacattcaaatatgtatccgctcatgagacaataaccctgataaatgcttcaataatattgaaaaaggaagagtatgagtattcaacatttccgtgtcgcccttattcccttttttgcggcattttgccttcctgtttttgctcacccagaaacgctggtgaaagtaaaagatgctgaagatcagttgggtgcacgagtgggttacatcgaactggatctcaacagcggtaagatccttgagagttttcgccccgaagaacgttttccaatgatgagcacttttaaagttctgctatgtggcgcggtattatcccgtgttgacgccgggcaagagcaactcggtcgccgcatacactattctcagaatgacttggttgagtactcaccagtcacagaaaagcatcttacggatggcatgacagtaagagaattatgcagtgctgcaataaccatgagtgataacactgcggccaacttacttctgacaacgatcggaggaccgaaggagctaaccgcttttttgcacaacatgggggatcatgtaactcgccttgatcgttgggaaccggagctgaatgaagccataccaaacgacgagcgtgacaccacgatgcctgcagcaatggcaacaacgttgcgcaaactattaactggcgaactacttactctagcttcccggcaacaattaatagactggatggaggcggataaagttgcaggaccacttctgcgctcggcccttccggctagctggtttattgctgataaatctggagccggtgagcgtgggtctcgcggtatcattgcagcactggggccagatggtaagccctcccgtatcgtagttatctacacgacggggagtcaggcaactatggatgaacgaaatagacagatcgctgagataggtgcctcactgattaagcattggtaactgcagaccaagtttactcatatatactttagattgatttaaaacttcatttttaatttaaaaggatctaggtgaagatcctttttgataatctcatgaccaaaatcccttaacgtgagttttcgttccactgagcgtcagaccccgtagaaaagatcaaaggatcttcttgagatcctttttttctgcgcgtaatctgctgcttgcaaacaaaaaaaccaccgctaccagcggtggtttgtttgccggatcaagagctaccaactctttttccgaaggtaactggcttcagcagagcgcagataccaaatactgtccttctagtgtagccgtagttaggccaccacttcaagaactctgtagcaccgcctacatacctcgctctgctaatcctgttaccagtggctgctgccagtggcgataagtcgtgtcttaccgggttggactcaagacgatagttaccggataaggcgcagcggtcgggctgaacggggggttcgtgcacacagcccagcttggagcgaacgacctacaccgaactgagatacctacagcgtgagctatgagaaagcgccacgcttcccgaagggagaaaggcggacaggtatccggtaagcggcagggtcggaacaggagagcgcacgagggagcttccagggggaaacgcctggtatctttatagtcctgtcgggtttcgccacctctgacttgagcgtcgatttttgtgatgctcgtcaggggggcggagcctatggaaaaacgccagcaacgcggcctttttacggttcctggccttttgctgg

SEQ ID NO: 73 - DNA, 7481 bp, Artificial
  Synthetic
agacttagggaccctgcggccgccattaattcctaatttttgttgacactctatcattgatagagttattttaccactccctatcagtgatagagaaaagtgaaatgaatagaccggccgctgagaaaaagcgaagcggctcgtgtgggtgcttgtgatgtaagactggtgatcgcaagattatcagcaacgcaagtaacactcgtgaattcgagagttttatctctttttaagagaatgcgattgctgagccaagtttagggttttctcaaaacccaagcagtattgaactgaagagtttgatcatggctcagattgaacgctggcggcaggcctaacacatgcaagtcgagcggatgaagggagcttgctcctggattcagcggcggacgggtgagtaatgcctaggaatctgcctggtagtgggggataacgtccggaaacgggcgctaataccgcatacgtcctgagggagaaagtgggggatcttcggacctcacgctatcagatgagcctaggtcggattagctagttggtggggtaaaggcctaccaaggcgacgatccgtaactggtctgagaggatgatcagtcacactggaactgagacacggtccagactcctacgggaggcagcagtggggaatattggacaatgggcgaaagcctgatccagccatgccgcgtgtgtgaagaaggtcttcggattgtaaagcactttaagttgggaggaagggcagtaagttaataccttgctgttttgacgttaccaacagaataagcaccggctaacttcgtgccagcagccgcggtaatacgaagggtgcaagcgttaatcggaattactgggcgtaaagcgcgcgtaggtggttcagcaagttggatgtgaaatccccgggctcaacctgggaactgcatccaaaactactgagctagagtacggtagagggtggtggaatttcctgtgtagcggtgaaatgcgtagatataggaaggaacaccagtggcgaaggcgaccacctggactgatactgacactgaggtgcgaaagcgtggggagcaaacaggattagataccctggtagtccacgccgtaaacgatgtcgactagccgttgggatccttgagatcttagtggcgcagctaacgcgataagtcgaccgcctggggagtacggccgcaaggttaaaactcaaatgaattgacgggggcccgcacaagcggtggagcatgtggtttaattcgaagcaacgcgaagaaccttacctggccttgacatgctgagaactttccagagatggattggtgccttcgggaactcagacacaggtgctgcatggctgtcgtcagctcgtgtcgtgagatgttgggttaagtcccgtaacgagcgcaacccttgtccttagttaccagcacctcgggtgggcactctaaggagactgccggtgacaaaccggaggaaggtggggatgacgtcaagtcatcatggcccttacggccagggctacacacgtgctacaatggtcggtacaaagggttgccaagccgcgaggtggagctaatcccataaaaccgatcgtagtccggatcgcagtctgcaactcgactgcgtgaagtcggaatcgctagtaatcgtgaatcagaatgtcacggtgaatacgttcccgggccttgtacacaccgcccgtcacaccatgggagtgggttgctccagaagtagctagtctaaccgcaagggggacggttaccacggagtgattcatgactggggtgaagtcgtaacaaggtagccgtaggggaacctgcggctggatcacctccttaatcgaagatctcagcttcttcataagctcccacacgaattgcttgattcactggttagacgattgggtctgtagctcagttggttagagcgcacccctgataagggtgaggtcggcagttcgaatctgcccagacccaccaattgttggtgtgctgcgtgatccgatacggggccatagctcagctgggagagcgcctgctttgcacgcaggaggtcaggagttcgatcctccttggctccaccatctaaaacaatcgtcgaaagctcagaaatgaatgttcgtgaatgaacattgatttctggtctttgcaccagaactgttctttaaaaattcgggtatgtgatagaagtaagactgaatgatctctttcactggtgatcattcaagtcaaggtaaaatttgcgagttcaagcgcgaattttcggcgaatgtcgtcttcacagtataaccagattgcttggggttatatggtcaagtgaagaagcgcatacggtggatgccttggcagtcagaggcgatgaaagacgtggtagcctgcgaaaagcttcggggagtcggcaaacagactttgatccggagatctctgaatgggggaacccacctaggataacctaggtatcttgtactgaatccataggtgcaagaggcgaaccaggggaactgaaacatctaagtaccctgaggaaaagaaatcaaccgagattcccttagtagtggcgagcgaacggggattagcccttaagcttcattgattttagcggaacgctctggaaagtgcggccatagtgggtgatagccccgtacgcgaaaggatctttgaagtgaaatcgagtaggacggagcacgagaaactttgtctgaacatggggggaccatcctccaaggctaaatactactgactgaccgatagtgaaccagtaccgtgagggaaaggcgaaaagaaccccggagaggggagtgaaatagaacctgaaaccgtatgcgtacaagcagtgggagcctacttgttaggtgactgcgtaccttttgtataatgggtcagcgacttatattcagtggcaagcttaaccgtatagggtaggcgtagcgaaagcgagtcttaatagggcgtttagtcgctgggtatagacccgaaaccgggcgatctatccatgagcaggttgaaggttaggtaacactgactggaggaccgaacccactcccgttgaaaaggtaggggatgacttgtggatcggagtgaaaggctaatcaagctcggagatagctggttctcctcgaaagctatttaggtagcgcctcatgtatcactctggggggtagagcactgtttcggctagggggtcatcccgacttaccaaaccgatgcaaactccgaatacccagaagtgccgagcatgggagacacacggcgggtgctaacgtccgtcgtgaaaagggaaacaacccagaccgccagctaaggtcccaaagttgtggttaagtggtaaacgatgtgggaaggcttagacagctaggaggttggcttagaagcagccaccctttaaagaaagcgtaatagctcactagtcgagtcggcctgcgcggaagatgtaacggggctcaaaccacacaccgaagctgcgggtgtcacgtaagtgacgcggtagaggagcgttctgtaagcctgtgaaggtgagttgagaagcttgctggaggtatcagaagtgcgaatgctgacatgagtaacgacaatgggtgtgaaaaacacccacgccgaaagaccaagggttcctgcgcaacgttaatcgacgcagggttagtcggttcctaaggcgaggctgaaaagcgtagtcgatgggaaacaggttaatattcctgtacttctggttactgcgatggagggacggagaaggctaggccagcttggcgttggttgtccaagtttaaggtggtaggctgaaatcttaggtaaatccggggtttcaaggccgagagctgatgacgagtcgtcttttagatgacgaagtggttgatgccatgcttccaagaaaagcttctaagcttcaggtaaccaggaaccgtaccccaaaccgacacaggtggtcgggtagagaataccaaggcgcttgagagaactcgggtgaaggaactaggcaaaatggcaccgtaacttcgggagaaggtgcgccggctagggtgaaggatttactccgtaagctctggctggtcgaagataccaggccgctgcgactgtttattaaaaacacagcactctgcaaacacgaaagtggacgtatagggtgtgacgcctgcccggtgccggaaggttaattgatggggttagcgcaagcgaagctcttgatcgaagccccggtaaacggcggccgtaactataacggtcctaaggtagcgaaattccttgtcgggtaagttccgacctgcacgaatggcgtaacgatggcggcgctgtctccacccgagactcagtgaaattgaaatcgctgtgaagatgcagtgtatccgcggctagacggaaagaccccgtgaacctttactgtagctttgcactggactttgagcctgcttgtgtaggataggtgggaggctttgaagcgtggacgccagttcgcgtggagccatccttgaaataccaccctggcatgcttgaggttctaactctggtccgtaatccggatcgaggacagtgtatggtgggcagtttgactggggcggtctcctcctaaagagtaacggaggagtacgaaggtgcgctcagaccggtcggaaatcggtcgcagagtataaaggcaaaagcgcgcttgactgcgagacagacacgtcgagcaggtacgaaagtaggtcttagtgatccggtggttctgtatggaagggccatcgctcaacggataaaaggtactccggggataacaggctgataccgcccaagagttcatatcgacggcggtgtttggcacctcgatgtcggctcatcacatcctggggctgaagccggtcccaagggtatggctgttcgccatttaaagtggtacgcgagctgggtttagaacgtcgtgagacagttcggtccctatctgccgtggacgtttgagatttgagaggggctgctcctagtacgagaggaccggagtggacgaacctctggtgttccggttgtcacgccagtggcattgccgggtagctatgttcggaaaagataaccgctgaaagcatctaagcgggaaacttgcctcaagatgagatctcactgggaacttgattcccctgaagggccgtcgaagactacgacgttgataggctgggtgtgtaagcgttgtgaggcgttgagctaaccagtactaattgcccgtgaggcttgaccatataacacccaaacaatctgacgattgtgtgttgtaaggtgaagtcgacgaaccgaaagttcgcatgaaccgcaaaacaccttgaaatcacatacctgaatccggatagacgtaagcccaagcgaacggatatccaaccgaattgcttgacgatcatagagcgttggaaccacctgatcccttcccgaactcagaagtgaaacgacgcatcgccgatggtagtgtggggtctccccatgtgagagtaggtcatcgtcaagctcctatcccaaaacccctggtcagcgatgaccgggggttttgcttttgcgcgcggaaaaaggcgtgcttcctgttcaccttgccgaacccctcctggcatgtcctctttcgcgtctagcgtagcgagagtccgggcggatccgcatggcgctggcgctcttgcgttcgccgtaccgatcccgatccgcgagttagagcctcgcttcgaggagaaagacaaaagatggcttccgatgaagggaatcgcttggcgcgccgggaaatgtgcgcggaacccctatttgtttatttttctaaatacattcaaatatgtatccgctcatgagacaataaccctgataaatgcttcaataatattgaaaaaggaagagtatgagtattcaacatttccgtgtcgcccttattcccttttttgcggcattttgccttcctgtttttgctcacccagaaacgctggtgaaagtaaaagatgctgaagatcagttgggtgcacgagtgggttacatcgaactggatctcaacagcggtaagatccttgagagttttcgccccgaagaacgttttccaatgatgagcacttttaaagttctgctatgtggcgcggtattatcccgtgttgacgccgggcaagagcaactcggtcgccgcatacactattctcagaatgacttggttgagtactcaccagtcacagaaaagcatcttacggatggcatgacagtaagagaattatgcagtgctgcaataaccatgagtgataacactgcggccaacttacttctgacaacgatcggaggaccgaaggagctaaccgcttttttgcacaacatgggggatcatgtaactcgccttgatcgttgggaaccggagctgaatgaagccataccaaacgacgagcgtgacaccacgatgcctgcagcaatggcaacaacgttgcgcaaactattaactggcgaactacttactctagcttcccggcaacaattaatagactggatggaggcggataaagttgcaggaccacttctgcgctcggcccttccggctagctggtttattgctgataaatctggagccggtgagcgtgggtctcgcggtatcattgcagcactggggccagatggtaagccctcccgtatcgtagttatctacacgacggggagtcaggcaactatggatgaacgaaatagacagatcgctgagataggtgcctcactgattaagcattggtaactgcagaccaagtttactcatatatactttagattgatttaaaacttcatttttaatttaaaaggatctaggtgaagatcctttttgataatctcatgaccaaaatcccttaacgtgagttttcgttccactgagcgtcagaccccgtagaaaagatcaaaggatcttcttgagatcctttttttctgcgcgtaatctgctgcttgcaaacaaaaaaaccaccgctaccagcggtggtttgtttgccggatcaagagctaccaactctttttccgaaggtaactggcttcagcagagcgcagataccaaatactgtccttctagtgtagccgtagttaggccaccacttcaagaactctgtagcaccgcctacatacctcgctctgctaatcctgttaccagtggctgctgccagtggcgataagtcgtgtcttaccgggttggactcaagacgatagttaccggataaggcgcagcggtcgggctgaacggggggttcgtgcacacagcccagcttggagcgaacgacctacaccgaactgagatacctacagcgtgagctatgagaaagcgccacgcttcccgaagggagaaaggcggacaggtatccggtaagcggcagggtcggaacaggagagcgcacgagggagcttccagggggaaacgcctggtatctttatagtcctgtcgggtttcgccacctctgacttgagcgtcgatttttgtgatgctcgtcaggggggcggagcctatggaaaaacgccagcaacgcggcctttttacggttcctggccttttgctgg

SEQ ID NO: 74 - DNA, 7400 bp, Artificial
  Synthetic
agacttagggaccctgcggccgccattaattcctaatttttgttgacactctatcattgatagagttattttaccactccctatcagtgatagagaaaagtgaaatgaatagaccggccgctgagaaaaagcgaagcggcactgctctttaacaatttatcagacaatctgtgtgggcactcgaagatacggattcttaacgtcgcaagacgaaaaatgaataccaagtctcaagagtgaacacgtaattcattacgaagtttaattctttgagcgtcaaacttttgaactgaagagtttgatcatggctcagattgaacgctggcggcaggcctaacacatgcaagtcgagcggatgaagggagcttgctcctggattcagcggcggacgggtgagtaatgcctaggaatctgcctggtagtgggggataacgtccggaaacgggcgctaataccgcatacgtcctgagggagaaagtgggggatcttcggacctcacgctatcagatgagcctaggtcggattagctagttggtggggtaaaggcctaccaaggcgacgatccgtaactggtctgagaggatgatcagtcacactggaactgagacacggtccagactcctacgggaggcagcagtggggaatattggacaatgggcgaaagcctgatccagccatgccgcgtgtgtgaagaaggtcttcggattgtaaagcactttaagttgggaggaagggcagtaagttaataccttgctgttttgacgttaccaacagaataagcaccggctaacttcgtgccagcagccgcggtaatacgaagggtgcaagcgttaatcggaattactgggcgtaaagcgcgcgtaggtggttcagcaagttggatgtgaaatccccgggctcaacctgggaactgcatccaaaactactgagctagagtacggtagagggtggtggaatttcctgtgtagcggtgaaatgcgtagatataggaaggaacaccagtggcgaaggcgaccacctggactgatactgacactgaggtgcgaaagcgtggggagcaaacaggattagataccctggtagtccacgccgtaaacgatgtcgactagccgttgggatccttgagatcttagtggcgcagctaacgcgataagtcgaccgcctggggagtacggccgcaaggttaaaactcaaatgaattgacgggggcccgcacaagcggtggagcatgtggtttaattcgaagcaacgcgaagaaccttacctggccttgacatgctgagaactttccagagatggattggtgccttcgggaactcagacacaggtgctgcatggctgtcgtcagctcgtgtcgtgagatgttgggttaagtcccgtaacgagcgcaacccttgtccttagttaccagcacctcgggtgggcactctaaggagactgccggtgacaaaccggaggaaggtggggatgacgtcaagtcatcatggcccttacggccagggctacacacgtgctacaatggtcggtacaaagggttgccaagccgcgaggtggagctaatcccataaaaccgatcgtagtccggatcgcagtctgcaactcgactgcgtgaagtcggaatcgctagtaatcgtgaatcagaatgtcacggtgaatacgttcccgggccttgtacacaccgcccgtcacaccatgggagtgggttgctccagaagtagctagtctaaccgcaagggggacggttaccacggagtgattcatgactggggtgaagtcgtaacaaggtagccgtaggggaacctgcggctggatcacctccttaccttaaagaagcgtactttgtagtgctcacacagattgtctgatagaaagtgaaaagcaaggcgtttacgcgttgggagtgaggctgaagagaataaggccgttcgctttctattaatgaaagctcaccctacacgaaaatatcacgcaacgcgtgataagcaattttcgtgtccccttcgtctagaggcccaggacaccgccctttcacggcggtaacaggggttcgaatcccctaggggacgccacttgctggtttgtgagtgaaagtcgccgaccttaatatctcaaaactcatcttcgggtgatgtttgagatatttgctctttaaaaatctggatcaagctgaaaattgaaacactgaacaacgagagttgttcgtgagtctctcaaattttcgcaacacgatgatgaatcgaaagaaacatcttcgggttgtgaggtcaagtgaagaagcgcatacggtggatgccttggcagtcagaggcgatgaaagacgtggtagcctgcgaaaagcttcggggagtcggcaaacagactttgatccggagatctctgaatgggggaacccacctaggataacctaggtatcttgtactgaatccataggtgcaagaggcgaaccaggggaactgaaacatctaagtaccctgaggaaaagaaatcaaccgagattcccttagtagtggcgagcgaacggggattagcccttaagcttcattgattttagcggaacgctctggaaagtgcggccatagtgggtgatagccccgtacgcgaaaggatctttgaagtgaaatcgagtaggacggagcacgagaaactttgtctgaacatggggggaccatcctccaaggctaaatactactgactgaccgatagtgaaccagtaccgtgagggaaaggcgaaaagaaccccggagaggggagtgaaatagaacctgaaaccgtatgcgtacaagcagtgggagcctacttgttaggtgactgcgtaccttttgtataatgggtcagcgacttatattcagtggcaagcttaaccgtatagggtaggcgtagcgaaagcgagtcttaatagggcgtttagtcgctgggtatagacccgaaaccgggcgatctatccatgagcaggttgaaggttaggtaacactgactggaggaccgaacccactcccgttgaaaaggtaggggatgacttgtggatcggagtgaaaggctaatcaagctcggagatagctggttctcctcgaaagctatttaggtagcgcctcatgtatcactctggggggtagagcactgtttcggctagggggtcatcccgacttaccaaaccgatgcaaactccgaatacccagaagtgccgagcatgggagacacacggcgggtgctaacgtccgtcgtgaaaagggaaacaacccagaccgccagctaaggtcccaaagttgtggttaagtggtaaacgatgtgggaaggcttagacagctaggaggttggcttagaagcagccaccctttaaagaaagcgtaatagctcactagtcgagtcggcctgcgcggaagatgtaacggggctcaaaccacacaccgaagctgcgggtgtcacgtaagtgacgcggtagaggagcgttctgtaagcctgtgaaggtgagttgagaagcttgctggaggtatcagaagtgcgaatgctgacatgagtaacgacaatgggtgtgaaaaacacccacgccgaaagaccaagggttcctgcgcaacgttaatcgacgcagggttagtcggttcctaaggcgaggctgaaaagcgtagtcgatgggaaacaggttaatattcctgtacttctggttactgcgatggagggacggagaaggctaggccagcttggcgttggttgtccaagtttaaggtggtaggctgaaatcttaggtaaatccggggtttcaaggccgagagctgatgacgagtcgtcttttagatgacgaagtggttgatgccatgcttccaagaaaagcttctaagcttcaggtaaccaggaaccgtaccccaaaccgacacaggtggtcgggtagagaataccaaggcgcttgagagaactcgggtgaaggaactaggcaaaatggcaccgtaacttcgggagaaggtgcgccggctagggtgaaggatttactccgtaagctctggctggtcgaagataccaggccgctgcgactgtttattaaaaacacagcactctgcaaacacgaaagtggacgtatagggtgtgacgcctgcccggtgccggaaggttaattgatggggttagcgcaagcgaagctcttgatcgaagccccggtaaacggcggccgtaactataacggtcctaaggtagcgaaattccttgtcgggtaagttccgacctgcacgaatggcgtaacgatggcggcgctgtctccacccgagactcagtgaaattgaaatcgctgtgaagatgcagtgtatccgcggctagacggaaagaccccgtgaacctttactgtagctttgcactggactttgagcctgcttgtgtaggataggtgggaggctttgaagcgtggacgccagttcgcgtggagccatccttgaaataccaccctggcatgcttgaggttctaactctggtccgtaatccggatcgaggacagtgtatggtgggcagtttgactggggcggtctcctcctaaagagtaacggaggagtacgaaggtgcgctcagaccggtcggaaatcggtcgcagagtataaaggcaaaagcgcgcttgactgcgagacagacacgtcgagcaggtacgaaagtaggtcttagtgatccggtggttctgtatggaagggccatcgctcaacggataaaaggtactccggggataacaggctgataccgcccaagagttcatatcgacggcggtgtttggcacctcgatgtcggctcatcacatcctggggctgaagccggtcccaagggtatggctgttcgccatttaaagtggtacgcgagctgggtttagaacgtcgtgagacagttcggtccctatctgccgtggacgtttgagatttgagaggggctgctcctagtacgagaggaccggagtggacgaacctctggtgttccggttgtcacgccagtggcattgccgggtagctatgttcggaaaagataaccgctgaaagcatctaagcgggaaacttgcctcaagatgagatctcactgggaacttgattcccctgaagggccgtcgaagactacgacgttgataggctgggtgtgtaagcgttgtgaggcgttgagctaaccagtactaattgcccgtgaggcttgaccatacaacgccgaagctgttttggcggatgagagaagattttcagcctgatacagattaaatcagaacgcagaagcggtctgataaaacagaattttgcttgacgatcatagagcgttggaaccacctgatcccttcccgaactcagaagtgaaacgacgcatcgccgatggtagtgtggggtctccccatgtgagagtaggtcatcgtcaagctccaaataaaacgaaaggctcagtcgaaagactgggcctttcgttttatctgttgtttgtcggtgaacgctctcctgagtaggacaaatccgccgggagcggatttgaacgttgcgaagcaacggcccggagggtggcgggcaggacgcccgccataaactgccaggcatcaaattaagcagaaggccatcctgacggatggcctttttgcgtttctacaaactcttcctgtcgtcatatctacaagccggcgcgccgggaaatgtgcgcggaacccctatttgtttatttttctaaatacattcaaatatgtatccgctcatgagacaataaccctgataaatgcttcaataatattgaaaaaggaagagtatgagtattcaacatttccgtgtcgcccttattcccttttttgcggcattttgccttcctgtttttgctcacccagaaacgctggtgaaagtaaaagatgctgaagatcagttgggtgcacgagtgggttacatcgaactggatctcaacagcggtaagatccttgagagttttcgccccgaagaacgttttccaatgatgagcacttttaaagttctgctatgtggcgcggtattatcccgtgttgacgccgggcaagagcaactcggtcgccgcatacactattctcagaatgacttggttgagtactcaccagtcacagaaaagcatcttacggatggcatgacagtaagagaattatgcagtgctgcaataaccatgagtgataacactgcggccaacttacttctgacaacgatcggaggaccgaaggagctaaccgcttttttgcacaacatgggggatcatgtaactcgccttgatcgttgggaaccggagctgaatgaagccataccaaacgacgagcgtgacaccacgatgcctgcagcaatggcaacaacgttgcgcaaactattaactggcgaactacttactctagcttcccggcaacaattaatagactggatggaggcggataaagttgcaggaccacttctgcgctcggcccttccggctagctggtttattgctgataaatctggagccggtgagcgtgggtctcgcggtatcattgcagcactggggccagatggtaagccctcccgtatcgtagttatctacacgacggggagtcaggcaactatggatgaacgaaatagacagatcgctgagataggtgcctcactgattaagcattggtaactgcagaccaagtttactcatatatactttagattgatttaaaacttcatttttaatttaaaaggatctaggtgaagatcctttttgataatctcatgaccaaaatcccttaacgtgagttttcgttccactgagcgtcagaccccgtagaaaagatcaaaggatcttcttgagatcctttttttctgcgcgtaatctgctgcttgcaaacaaaaaaaccaccgctaccagcggtggtttgtttgccggatcaagagctaccaactctttttccgaaggtaactggcttcagcagagcgcagataccaaatactgtccttctagtgtagccgtagttaggccaccacttcaagaactctgtagcaccgcctacatacctcgctctgctaatcctgttaccagtggctgctgccagtggcgataagtcgtgtcttaccgggttggactcaagacgatagttaccggataaggcgcagcggtcgggctgaacggggggttcgtgcacacagcccagcttggagcgaacgacctacaccgaactgagatacctacagcgtgagctatgagaaagcgccacgcttcccgaagggagaaaggcggacaggtatccggtaagcggcagggtcggaacaggagagcgcacgagggagcttccagggggaaacgcctggtatctttatagtcctgtcgggtttcgccacctctgacttgagcgtcgatttttgtgatgctcgtcaggggggcggagcctatggaaaaacgccagcaacgcggcctttttacggttcctggccttttgctgg

SEQ ID NO: 75 - DNA, 7481 bp, Artificial
  Synthetic
agacttagggaccctgcggccgccattaattcctaatttttgttgacactctatcattgatagagttattttaccactccctatcagtgatagagaaaagtgaaatgaatagaccggccgctgagaaaaagcgaagcggctcgtgtgggtgcttgtgatgtaagactggtgatcgcaagattatcagcaacgcaagtaacactcgtgaattcgagagttttatctctttttaagagaatgcgattgctgagccaagtttagggttttctcaaaacccaagcagtattgaactgaagagtttgatcatggctcagattgaacgctggcggcaggcctaacacatgcaagtcgagcggatgaagggagcttgctcctggattcagcggcggacgggtgagtaatgcctaggaatctgcctggtagtgggggataacgtccggaaacgggcgctaataccgcatacgtcctgagggagaaagtgggggatcttcggacctcacgctatcagatgagcctaggtcggattagctagttggtggggtaaaggcctaccaaggcgacgatccgtaactggtctgagaggatgatcagtcacactggaactgagacacggtccagactcctacgggaggcagcagtggggaatattggacaatgggcgaaagcctgatccagccatgccgcgtgtgtgaagaaggtcttcggattgtaaagcactttaagttgggaggaagggcagtaagttaataccttgctgttttgacgttaccaacagaataagcaccggctaacttcgtgccagcagccgcggtaatacgaagggtgcaagcgttaatcggaattactgggcgtaaagcgcgcgtaggtggttcagcaagttggatgtgaaatccccgggctcaacctgggaactgcatccaaaactactgagctagagtacggtagagggtggtggaatttcctgtgtagcggtgaaatgcgtagatataggaaggaacaccagtggcgaaggcgaccacctggactgatactgacactgaggtgcgaaagcgtggggagcaaacaggattagataccctggtagtccacgccgtaaacgatgtcgactagccgttgggatccttgagatcttagtggcgcagctaacgcgataagtcgaccgcctggggagtacggccgcaaggttaaaactcaaatgaattgacgggggcccgcacaagcggtggagcatgtggtttaattcgaagcaacgcgaagaaccttacctggccttgacatgctgagaactttccagagatggattggtgccttcgggaactcagacacaggtgctgcatggctgtcgtcagctcgtgtcgtgagatgttgggttaagtcccgtaacgagcgcaacccttgtccttagttaccagcacctcgggtgggcactctaaggagactgccggtgacaaaccggaggaaggtggggatgacgtcaagtcatcatggcccttacggccagggctacacacgtgctacaatggtcggtacaaagggttgccaagccgcgaggtggagctaatcccataaaaccgatcgtagtccggatcgcagtctgcaactcgactgcgtgaagtcggaatcgctagtaatcgtgaatcagaatgtcacggtgaatacgttcccgggccttgtacacaccgcccgtcacaccatgggagtgggttgctccagaagtagctagtctaaccgcaagggggacggttaccacggagtgattcatgactggggtgaagtcgtaacaaggtagccgtaggggaacctgcggctggatcatgtggttaatcgaagatctcagcttcttcataagctcccacacgaattgcttgattcactggttagacgattgggtctgtagctcagttggttagagcgcacccctgataagggtgaggtcggcagttcgaatctgcccagacccaccaattgttggtgtgctgcgtgatccgatacggggccatagctcagctgggagagcgcctgctttgcacgcaggaggtcaggagttcgatcctccttggctccaccatctaaaacaatcgtcgaaagctcagaaatgaatgttcgtgaatgaacattgatttctggtctttgcaccagaactgttctttaaaaattcgggtatgtgatagaagtaagactgaatgatctctttcactggtgatcattcaagtcaaggtaaaatttgcgagttcaagcgcgaattttcggcgaatgtcgtcttcacagtataaccagattgcttggggttatatggtcaagtgaagaagcgcatacggtggatgccttggcagtcagaggcgatgaaagacgtggtagcctgcgaaaagcttcggggagtcggcaaacagactttgatccggagatctctgaatgggggaacccacctaggataacctaggtatcttgtactgaatccataggtgcaagaggcgaaccaggggaactgaaacatctaagtaccctgaggaaaagaaatcaaccgagattcccttagtagtggcgagcgaacggggattagcccttaagcttcattgattttagcggaacgctctggaaagtgcggccatagtgggtgatagccccgtacgcgaaaggatctttgaagtgaaatcgagtaggacggagcacgagaaactttgtctgaacatggggggaccatcctccaaggctaaatactactgactgaccgatagtgaaccagtaccgtgagggaaaggcgaaaagaaccccggagaggggagtgaaatagaacctgaaaccgtatgcgtacaagcagtgggagcctacttgttaggtgactgcgtaccttttgtataatgggtcagcgacttatattcagtggcaagcttaaccgtatagggtaggcgtagcgaaagcgagtcttaatagggcgtttagtcgctgggtatagacccgaaaccgggcgatctatccatgagcaggttgaaggttaggtaacactgactggaggaccgaacccactcccgttgaaaaggtaggggatgacttgtggatcggagtgaaaggctaatcaagctcggagatagctggttctcctcgaaagctatttaggtagcgcctcatgtatcactctggggggtagagcactgtttcggctagggggtcatcccgacttaccaaaccgatgcaaactccgaatacccagaagtgccgagcatgggagacacacggcgggtgctaacgtccgtcgtgaaaagggaaacaacccagaccgccagctaaggtcccaaagttgtggttaagtggtaaacgatgtgggaaggcttagacagctaggaggttggcttagaagcagccaccctttaaagaaagcgtaatagctcactagtcgagtcggcctgcgcggaagatgtaacggggctcaaaccacacaccgaagctgcgggtgtcacgtaagtgacgcggtagaggagcgttctgtaagcctgtgaaggtgagttgagaagcttgctggaggtatcagaagtgcgaatgctgacatgagtaacgacaatgggtgtgaaaaacacccacgccgaaagaccaagggttcctgcgcaacgttaatcgacgcagggttagtcggttcctaaggcgaggctgaaaagcgtagtcgatgggaaacaggttaatattcctgtacttctggttactgcgatggagggacggagaaggctaggccagcttggcgttggttgtccaagtttaaggtggtaggctgaaatcttaggtaaatccggggtttcaaggccgagagctgatgacgagtcgtcttttagatgacgaagtggttgatgccatgcttccaagaaaagcttctaagcttcaggtaaccaggaaccgtaccccaaaccgacacaggtggtcgggtagagaataccaaggcgcttgagagaactcgggtgaaggaactaggcaaaatggcaccgtaacttcgggagaaggtgcgccggctagggtgaaggatttactccgtaagctctggctggtcgaagataccaggccgctgcgactgtttattaaaaacacagcactctgcaaacacgaaagtggacgtatagggtgtgacgcctgcccggtgccggaaggttaattgatggggttagcgcaagcgaagctcttgatcgaagccccggtaaacggcggccgtaactataacggtcctaaggtagcgaaattccttgtcgggtaagttccgacctgcacgaatggcgtaacgatggcggcgctgtctccacccgagactcagtgaaattgaaatcgctgtgaagatgcagtgtatccgcggctagacggaaagaccccgtgaacctttactgtagctttgcactggactttgagcctgcttgtgtaggataggtgggaggctttgaagcgtggacgccagttcgcgtggagccatccttgaaataccaccctggcatgcttgaggttctaactctggtccgtaatccggatcgaggacagtgtatggtgggcagtttgactggggcggtctcctcctaaagagtaacggaggagtacgaaggtgcgctcagaccggtcggaaatcggtcgcagagtataaaggcaaaagcgcgcttgactgcgagacagacacgtcgagcaggtacgaaagtaggtcttagtgatccggtggttctgtatggaagggccatcgctcaacggataaaaggtactccggggataacaggctgataccgcccaagagttcatatcgacggcggtgtttggcacctcgatgtcggctcatcacatcctggggctgaagccggtcccaagggtatggctgttcgccatttaaagtggtacgcgagctgggtttagaacgtcgtgagacagttcggtccctatctgccgtggacgtttgagatttgagaggggctgctcctagtacgagaggaccggagtggacgaacctctggtgttccggttgtcacgccagtggcattgccgggtagctatgttcggaaaagataaccgctgaaagcatctaagcgggaaacttgcctcaagatgagatctcactgggaacttgattcccctgaagggccgtcgaagactacgacgttgataggctgggtgtgtaagcgttgtgaggcgttgagctaaccagtactaattgcccgtgaggcttgaccatataacacccaaacaatctgacgattgtgtgttgtaaggtgaagtcgacgaaccgaaagttcgcatgaaccgcaaaacaccttgaaatcacatacctgaatccggatagacgtaagcccaagcgaacggatatccaaccgaattgcttgacgatcatagagcgttggaaccacctgatcccttcccgaactcagaagtgaaacgacgcatcgccgatggtagtgtggggtctccccatgtgagagtaggtcatcgtcaagctcctatcccaaaacccctggtcagcgatgaccgggggttttgcttttgcgcgcggaaaaaggcgtgcttcctgttcaccttgccgaacccctcctggcatgtcctctttcgcgtctagcgtagcgagagtccgggcggatccgcatggcgctggcgctcttgcgttcgccgtaccgatcccgatccgcgagttagagcctcgcttcgaggagaaagacaaaagatggcttccgatgaagggaatcgcttggcgcgccgggaaatgtgcgcggaacccctatttgtttatttttctaaatacattcaaatatgtatccgctcatgagacaataaccctgataaatgcttcaataatattgaaaaaggaagagtatgagtattcaacatttccgtgtcgcccttattcccttttttgcggcattttgccttcctgtttttgctcacccagaaacgctggtgaaagtaaaagatgctgaagatcagttgggtgcacgagtgggttacatcgaactggatctcaacagcggtaagatccttgagagttttcgccccgaagaacgttttccaatgatgagcacttttaaagttctgctatgtggcgcggtattatcccgtgttgacgccgggcaagagcaactcggtcgccgcatacactattctcagaatgacttggttgagtactcaccagtcacagaaaagcatcttacggatggcatgacagtaagagaattatgcagtgctgcaataaccatgagtgataacactgcggccaacttacttctgacaacgatcggaggaccgaaggagctaaccgcttttttgcacaacatgggggatcatgtaactcgccttgatcgttgggaaccggagctgaatgaagccataccaaacgacgagcgtgacaccacgatgcctgcagcaatggcaacaacgttgcgcaaactattaactggcgaactacttactctagcttcccggcaacaattaatagactggatggaggcggataaagttgcaggaccacttctgcgctcggcccttccggctagctggtttattgctgataaatctggagccggtgagcgtgggtctcgcggtatcattgcagcactggggccagatggtaagccctcccgtatcgtagttatctacacgacggggagtcaggcaactatggatgaacgaaatagacagatcgctgagataggtgcctcactgattaagcattggtaactgcagaccaagtttactcatatatactttagattgatttaaaacttcatttttaatttaaaaggatctaggtgaagatcctttttgataatctcatgaccaaaatcccttaacgtgagttttcgttccactgagcgtcagaccccgtagaaaagatcaaaggatcttcttgagatcctttttttctgcgcgtaatctgctgcttgcaaacaaaaaaaccaccgctaccagcggtggtttgtttgccggatcaagagctaccaactctttttccgaaggtaactggcttcagcagagcgcagataccaaatactgtccttctagtgtagccgtagttaggccaccacttcaagaactctgtagcaccgcctacatacctcgctctgctaatcctgttaccagtggctgctgccagtggcgataagtcgtgtcttaccgggttggactcaagacgatagttaccggataaggcgcagcggtcgggctgaacggggggttcgtgcacacagcccagcttggagcgaacgacctacaccgaactgagatacctacagcgtgagctatgagaaagcgccacgcttcccgaagggagaaaggcggacaggtatccggtaagcggcagggtcggaacaggagagcgcacgagggagcttccagggggaaacgcctggtatctttatagtcctgtcgggtttcgccacctctgacttgagcgtcgatttttgtgatgctcgtcaggggggcggagcctatggaaaaacgccagcaacgcggcctttttacggttcctggccttttgctgg

SEQ ID NO: 76 - DNA, 7651 bp, Artificial
  Synthetic
agacttagggaccctgcggccgccattaattcctaatttttgttgacactctatcattgatagagttattttaccactccctatcagtgatagagaaaagtgaaatgaatagaccggccgctgagaaaaagcgaagcggcttttactgattgattaatcgaaataattttcattgattgattggtttaaattactcgaagtttatttgagcgaaatttaagtcagtaattgatgagccagaattggcaccttgtctataaataaggtgcaaaatgattttaactgaagagtttgatcatggctcagattgaacgctggcggcaggcttaacacatgcaagtcgagcgggggaaggtagcttgctaccggacctagcggcggacgggtgagtaatgcttaggaatctgcctattagtgggggacaacatctcgaaagggatgctaataccgcatacgtcctacgggagaaagcaggggatcttcggaccttgcgctaatagatgagcctaagtcggattagctagttggtggggtaaaggcctaccaaggcgacgatctgtagcgggtctgagaggatgatccgccacactgggactgagacacggcccagactcctacgggaggcagcagtggggaatattggacaatgggcgcaagcctgatccagccatgccgcgtgtgtgaagaaggccttatggttgtaaagcactttaagcgaggaggaggctactttagataatacctagagatagtggacgttactcgcagaataagcaccggctaactctgtgccagcagccgcggtaatacagagggtgcaagcgttaatcggatttactgggcgtaaagcgcgcgtaggcggctaattaagtcaaatgtgaaatccccgagcttaacttgggaattgcattcgatactggttagctagagtgtgggagaggatggtagaattccaggtgtagcggtgaaatgcgtagagatctggaggaataccgatggcgaaggcagccatctggcctaacactgacgctgaggtgcgaaagcatggggagcaaacaggattagataccctggtagtccatgccgtaaacgatgtctactagccgttggggcctttgaggctttagtggcgcagctaacgcgataagtagaccgcctggggagtacggtcgcaagactaaaactcaaatgaattgacgggggcccgcacaagcggtggagcatgtggtttaattcgatgcaacgcgaagaaccttacctggccttgacatagtaagaactttccagagatggattggtgccttcgggaacttacatacaggtgctgcatggctgtcgtcagctcgtgtcgtgagatgttgggttaagtcccgcaacgagcgcaacccttttccttatttgccagcgagtaatgtcgggaactttaaggatactgccagtgacaaactggaggaaggcggggacgacgtcaagtcatcatggcccttacggccagggctacacacgtgctacaatggtcggtacaaagggttgctacacagcgatgtgatgctaatctcaaaaagccgatcgtagtccggattggagtctgcaactcgactccatgaagtcggaatcgctagtaatcgcggatcagaatgccgcggtgaatacgttcccgggccttgtacacaccgcccgtcacaccatgggagtttgttgcaccagaagtagctagcctaactgcaaagagggcggttaccacggtgtggccgatgactggggtgaagtcgtaacaaggtagccgtaggggaacctgcggctggatcacctcctatacgaaagattgacgattggtaagaatccacaacaagttgttcttcatagatgtatctgagggtctgtagctcagttggttagagcacacgcttgataagcgtggggtcacaagttcaagtcttgtcagacccaccatgactttgactggttaaagttatagataaaagatacatgactgatgatgtaagctggggacttagcttagttggtagagcgcctgctttgcacgcaggaggtcaggagttcgactctcctagtctccaccagaacttaagataagttcggattacagaaattagtaaatagagatttcggtcttggtttattaacttctgtgatttaagtatcacggtattaagcatgacctgacgaaggcgtgtttattcattaacagattggcaaaattgagtctgaaataaattgttcactcaataacaaagagagacgaagtaattctgatcttggagttaattgagaactagcaaattaactgaatcaagcgttttggtatatgaatttagattgaagctgtacagtgtttaaatacacagtgctctaaactgaaatgttgaagttactaacttgtaggtaacgtcgactgtttggggttgtatagtcaagtaattaagtgcatgtggtggatgccttggcagtcagaggcgatgaaagacgtgatagcctgcgaaaagctccggggaggcggcaaatatcctttgatccggagatgtctgaatgggggaacccacctactttaaggtaggtattgcaacatgaatacatagtgttgcaaggcgaacgaggggaagtgaaacatctcagtacccttaggaaaagaaatcaattgagattccctcagtagcggcgagcgaacggggatcagcccattaagttatgtgtgttttagtggaacgctctgggaagtgcgaacgtagagggtgatattcccgtacacgaaagggcacacataatgatgacgagtagggcgaggcacgtgaaaccttgtctgaatatggggggaccatcctccaaggctaaatactcctgactgaccgatagtgaaccagtaccgtgagggaaaggcgaaaagaacccctgtgaggggagtgaaatagatcctgaaaccgcatgcatacaagcagtgggagcaccttcgtggtgtgactgcgtaccttttgtataatgggtcagcgacttatattcagtagcgaggttaaccgtataggggagccgtagagaaatcgagtcttaatagggcgtttagttgctgggtatagacccgaaaccaggcgatctatccatgagcaggttgaaggttgggtaacactaactggaggaccgaacccactgtcgttgaaaagccaggggatgacttgtggataggggtgaaaggctaatcaagcctggtgatagctggttctccccgaaagctatttaggtagcgcctcggacgaataccatagggggtagagcactgtttcggctagggggtcatcccgacttaccaaaccgatgcaaactccgaatacctatgagtactatccgggagacagactgcgggtgctaacgtccgtagtcaagaggaaaacaatccagaccgccagctaaggccccaaaatcatagttaagtgggaaacgatgtgggaaggcatagacagctaggaggttggcttagaagcagccaccctttaaagaaagcgtaatagctcactagtcgagtcggcctgcgcggaagatgtaacggggctaaaactatgtgccgaagctgcggatttgacattagtcaagtggtaggggagcgttctgtaagccgatgaaggtgtattgagaagtatgctggaggtatcagaagtgcgaatgctgacgtgagtaacgacaaaacgggtgaaaaacccgttcgccgaaagaccaagggttccagtccaacgttaatcggggctgggtgagtcgacccctaaggcgaggccgaaaggcgtagtcgatgggaaattggttaatattccaatacttctgtgtaatgcgatgagaggacggagaaggttaagtcagcctggcgttggttgtccaggtggaaggatgtaggtatgtatcttaggcaaatccggggtactctatactgagatccgatagcaagctgtacttgtacagcgaagtggctgataccatgcttccaggaaaagtctctaagcttcagttacacaggaatcgtacccgaaaccgacacaggtggtcaggtcgagtagaccaaggcgcttgagagaactctgctgaaggaactaggcaaaatggtaccgtaacttcgggagaaggtacgctgttgttggtgatggaacttgcttcctgagctgatgacagccgcagaaaccaggccgctgcaactgtttattaaaaacatagcactctgcaaacacgaaagtggacgtatagggtgtgatgcctgcccggtgctggaaggttaattgatggggttagcgtaagcgaagctcttgatcgaagccccagtaaacggcggccgtaactataacggtcctaaggtagcgaaattccttgtcgggtaagttccgacctgcacgaatggcataatgatggcggcgctgtctccagcagaggctcagtgaaatcgaaatcgctgtgaagatgcagtgtacccgcggctagacggaaagaccccgtgaacctttactgcagcttgacactgaactttgaccttacttgtgtaggataggtgggaggctttgaagttggaacgctagttccaatggagccgtccttgaaataccaccctggtaatgttgaggttctaactctgtcccgttatccgggacgaggaccgtgtctggtgggtagtttgactggggcggtctcctcctaaagagtaacggaggagtacgaaggtgcgctcagcgtggtcggaaatcacgcatagagtataaaggcaaaagcgcgcttaactgcgagacccacaagtcgagcaggtacgaaagtaggtcttagtgatccggtggttctgtatggaagggccatcgctcaacggataaaaggtactctggggataacaggctgataccgcccaagagttcatatcgacggcggtgtttggcacctcgatgtcggctcatctcatcctggggctgaagcaggtcccaagggtatggctgttcgccatttaaagaggtacgcgagctgggtttagaacgtcgtgagacagttcggtccctatctaccgtgggcgctggaaatttgagaggatctgctcctagtacgagaggaccagagtggacgaacctctggtgtaccggttgtgacgccagtcgcatcgccgggtagctatgttcggaagggataaccgctgaaagcatctaagcgggaagcctacctcaagataagatttccctaggaatttattcctctaaagagccgttcgagactaggacgttgataggttggatgtggaagcatagtgatatgtgaagctgaccaatactaattgctcgtgaggcttgactatacaacacccaagcagttgtatacaaagtatcaatcgattcataaatctacaaacaaacttgatttagttattccactagataaaatgaacacagtcagattcaatcagcccaatctgtaaagatttggaaaacgcttcggcagtcaataagaccaaagcaagtatccataaacagttgtgctggcgaccatagcaagagtgaaccacctgatcccttcccgaactcagaagtgaaacctcttagcgctgatggtagtgtggggttacccatgtgagagtaagtcatcgccagctcattattctaaacacccccattctaaagagtgggggtgttttttattgcgcgaaataaagtgaaaatttaattcatgaagcaataatcttttttgattatcctcaatcgatcattagatataactcaaaataaccttaatattattttagaagattaaattactacttttctcatgaaatgctgagtcaatatataggataaaccattactatatgctataaataatgaataggcatgatttttgcttgcgcgccgggaaatgtgcgcggaacccctatttgtttatttttctaaatacattcaaatatgtatccgctcatgagacaataaccctgataaatgcttcaataatattgaaaaaggaagagtatgagtattcaacatttccgtgtcgcccttattcccttttttgcggcattttgccttcctgtttttgctcacccagaaacgctggtgaaagtaaaagatgctgaagatcagttgggtgcacgagtgggttacatcgaactggatctcaacagcggtaagatccttgagagttttcgccccgaagaacgttttccaatgatgagcacttttaaagttctgctatgtggcgcggtattatcccgtgttgacgccgggcaagagcaactcggtcgccgcatacactattctcagaatgacttggttgagtactcaccagtcacagaaaagcatcttacggatggcatgacagtaagagaattatgcagtgctgcaataaccatgagtgataacactgcggccaacttacttctgacaacgatcggaggaccgaaggagctaaccgcttttttgcacaacatgggggatcatgtaactcgccttgatcgttgggaaccggagctgaatgaagccataccaaacgacgagcgtgacaccacgatgcctgcagcaatggcaacaacgttgcgcaaactattaactggcgaactacttactctagcttcccggcaacaattaatagactggatggaggcggataaagttgcaggaccacttctgcgctcggcccttccggctagctggtttattgctgataaatctggagccggtgagcgtgggtctcgcggtatcattgcagcactggggccagatggtaagccctcccgtatcgtagttatctacacgacggggagtcaggcaactatggatgaacgaaatagacagatcgctgagataggtgcctcactgattaagcattggtaactgcagaccaagtttactcatatatactttagattgatttaaaacttcatttttaatttaaaaggatctaggtgaagatcctttttgataatctcatgaccaaaatcccttaacgtgagttttcgttccactgagcgtcagaccccgtagaaaagatcaaaggatcttcttgagatcctttttttctgcgcgtaatctgctgcttgcaaacaaaaaaaccaccgctaccagcggtggtttgtttgccggatcaagagctaccaactctttttccgaaggtaactggcttcagcagagcgcagataccaaatactgtccttctagtgtagccgtagttaggccaccacttcaagaactctgtagcaccgcctacatacctcgctctgctaatcctgttaccagtggctgctgccagtggcgataagtcgtgtcttaccgggttggactcaagacgatagttaccggataaggcgcagcggtcgggctgaacggggggttcgtgcacacagcccagcttggagcgaacgacctacaccgaactgagatacctacagcgtgagctatgagaaagcgccacgcttcccgaagggagaaaggcggacaggtatccggtaagcggcagggtcggaacaggagagcgcacgagggagcttccagggggaaacgcctggtatctttatagtcctgtcgggtttcgccacctctgacttgagcgtcgatttttgtgatgctcgtcaggggggcggagcctatggaaaaacgccagcaacgcggcctttttacggttcctggccttttgctgg

SEQ ID NO: 77 - DNA, 7400 bp, Artificial
  Synthetic
agacttagggaccctgcggccgccattaattcctaatttttgttgacactctatcattgatagagttattttaccactccctatcagtgatagagaaaagtgaaatgaatagaccggccgctgagaaaaagcgaagcggcactgctctttaacaatttatcagacaatctgtgtgggcactcgaagatacggattcttaacgtcgcaagacgaaaaatgaataccaagtctcaagagtgaacacgtaattcattacgaagtttaattctttgagcgtcaaactttttaactgaagagtttgatcatggctcagattgaacgctggcggcaggcttaacacatgcaagtcgagcgggggaaggtagcttgctaccggacctagcggcggacgggtgagtaatgcttaggaatctgcctattagtgggggacaacatctcgaaagggatgctaataccgcatacgtcctacgggagaaagcaggggatcttcggaccttgcgctaatagatgagcctaagtcggattagctagttggtggggtaaaggcctaccaaggcgacgatctgtagcgggtctgagaggatgatccgccacactgggactgagacacggcccagactcctacgggaggcagcagtggggaatattggacaatgggcgcaagcctgatccagccatgccgcgtgtgtgaagaaggccttatggttgtaaagcactttaagcgaggaggaggctactttagataatacctagagatagtggacgttactcgcagaataagcaccggctaactctgtgccagcagccgcggtaatacagagggtgcaagcgttaatcggatttactgggcgtaaagcgcgcgtaggcggctaattaagtcaaatgtgaaatccccgagcttaacttgggaattgcattcgatactggttagctagagtgtgggagaggatggtagaattccaggtgtagcggtgaaatgcgtagagatctggaggaataccgatggcgaaggcagccatctggcctaacactgacgctgaggtgcgaaagcatggggagcaaacaggattagataccctggtagtccatgccgtaaacgatgtctactagccgttggggcctttgaggctttagtggcgcagctaacgcgataagtagaccgcctggggagtacggtcgcaagactaaaactcaaatgaattgacgggggcccgcacaagcggtggagcatgtggtttaattcgatgcaacgcgaagaaccttacctggccttgacatagtaagaactttccagagatggattggtgccttcgggaacttacatacaggtgctgcatggctgtcgtcagctcgtgtcgtgagatgttgggttaagtcccgcaacgagcgcaacccttttccttatttgccagcgagtaatgtcgggaactttaaggatactgccagtgacaaactggaggaaggcggggacgacgtcaagtcatcatggcccttacggccagggctacacacgtgctacaatggtcggtacaaagggttgctacacagcgatgtgatgctaatctcaaaaagccgatcgtagtccggattggagtctgcaactcgactccatgaagtcggaatcgctagtaatcgcggatcagaatgccgcggtgaatacgttcccgggccttgtacacaccgcccgtcacaccatgggagtttgttgcaccagaagtagctagcctaactgcaaagagggcggttaccacggtgtggccgatgactggggtgaagtcgtaacaaggtagccgtaggggaacctgcggctggatcacctcctatccttaaagaagcgtactttgtagtgctcacacagattgtctgatagaaagtgaaaagcaaggcgtttacgcgttgggagtgaggctgaagagaataaggccgttcgctttctattaatgaaagctcaccctacacgaaaatatcacgcaacgcgtgataagcaattttcgtgtccccttcgtctagaggcccaggacaccgccctttcacggcggtaacaggggttcgaatcccctaggggacgccacttgctggtttgtgagtgaaagtcgccgaccttaatatctcaaaactcatcttcgggtgatgtttgagatatttgctctttaaaaatctggatcaagctgaaaattgaaacactgaacaacgagagttgttcgtgagtctctcaaattttcgcaacacgatgatgaatcgaaagaaacatcttcgggttgtgaagtcaagtaattaagtgcatgtggtggatgccttggcagtcagaggcgatgaaagacgtgatagcctgcgaaaagctccggggaggcggcaaatatcctttgatccggagatgtctgaatgggggaacccacctactttaaggtaggtattgcaacatgaatacatagtgttgcaaggcgaacgaggggaagtgaaacatctcagtacccttaggaaaagaaatcaattgagattccctcagtagcggcgagcgaacggggatcagcccattaagttatgtgtgttttagtggaacgctctgggaagtgcgaacgtagagggtgatattcccgtacacgaaagggcacacataatgatgacgagtagggcgaggcacgtgaaaccttgtctgaatatggggggaccatcctccaaggctaaatactcctgactgaccgatagtgaaccagtaccgtgagggaaaggcgaaaagaacccctgtgaggggagtgaaatagatcctgaaaccgcatgcatacaagcagtgggagcaccttcgtggtgtgactgcgtaccttttgtataatgggtcagcgacttatattcagtagcgaggttaaccgtataggggagccgtagagaaatcgagtcttaatagggcgtttagttgctgggtatagacccgaaaccaggcgatctatccatgagcaggttgaaggttgggtaacactaactggaggaccgaacccactgtcgttgaaaagccaggggatgacttgtggataggggtgaaaggctaatcaagcctggtgatagctggttctccccgaaagctatttaggtagcgcctcggacgaataccatagggggtagagcactgtttcggctagggggtcatcccgacttaccaaaccgatgcaaactccgaatacctatgagtactatccgggagacagactgcgggtgctaacgtccgtagtcaagaggaaaacaatccagaccgccagctaaggccccaaaatcatagttaagtgggaaacgatgtgggaaggcatagacagctaggaggttggcttagaagcagccaccctttaaagaaagcgtaatagctcactagtcgagtcggcctgcgcggaagatgtaacggggctaaaactatgtgccgaagctgcggatttgacattagtcaagtggtaggggagcgttctgtaagccgatgaaggtgtattgagaagtatgctggaggtatcagaagtgcgaatgctgacgtgagtaacgacaaaacgggtgaaaaacccgttcgccgaaagaccaagggttccagtccaacgttaatcggggctgggtgagtcgacccctaaggcgaggccgaaaggcgtagtcgatgggaaattggttaatattccaatacttctgtgtaatgcgatgagaggacggagaaggttaagtcagcctggcgttggttgtccaggtggaaggatgtaggtatgtatcttaggcaaatccggggtactctatactgagatccgatagcaagctgtacttgtacagcgaagtggctgataccatgcttccaggaaaagtctctaagcttcagttacacaggaatcgtacccgaaaccgacacaggtggtcaggtcgagtagaccaaggcgcttgagagaactctgctgaaggaactaggcaaaatggtaccgtaacttcgggagaaggtacgctgttgttggtgatggaacttgcttcctgagctgatgacagccgcagaaaccaggccgctgcaactgtttattaaaaacatagcactctgcaaacacgaaagtggacgtatagggtgtgatgcctgcccggtgctggaaggttaattgatggggttagcgtaagcgaagctcttgatcgaagccccagtaaacggcggccgtaactataacggtcctaaggtagcgaaattccttgtcgggtaagttccgacctgcacgaatggcataatgatggcggcgctgtctccagcagaggctcagtgaaatcgaaatcgctgtgaagatgcagtgtacccgcggctagacggaaagaccccgtgaacctttactgcagcttgacactgaactttgaccttacttgtgtaggataggtgggaggctttgaagttggaacgctagttccaatggagccgtccttgaaataccaccctggtaatgttgaggttctaactctgtcccgttatccgggacgaggaccgtgtctggtgggtagtttgactggggcggtctcctcctaaagagtaacggaggagtacgaaggtgcgctcagcgtggtcggaaatcacgcatagagtataaaggcaaaagcgcgcttaactgcgagacccacaagtcgagcaggtacgaaagtaggtcttagtgatccggtggttctgtatggaagggccatcgctcaacggataaaaggtactctggggataacaggctgataccgcccaagagttcatatcgacggcggtgtttggcacctcgatgtcggctcatctcatcctggggctgaagcaggtcccaagggtatggctgttcgccatttaaagaggtacgcgagctgggtttagaacgtcgtgagacagttcggtccctatctaccgtgggcgctggaaatttgagaggatctgctcctagtacgagaggaccagagtggacgaacctctggtgtaccggttgtgacgccagtcgcatcgccgggtagctatgttcggaagggataaccgctgaaagcatctaagcgggaagcctacctcaagataagatttccctaggaatttattcctctaaagagccgttcgagactaggacgttgataggttggatgtggaagcatagtgatatgtgaagctgaccaatactaattgctcgtgaggcttgactatacaacgccgaagctgttttggcggatgagagaagattttcagcctgatacagattaaatcagaacgcagaagcggtctgataaaacagaattgtgctggcgaccatagcaagagtgaaccacctgatcccttcccgaactcagaagtgaaacctcttagcgctgatggtagtgtggggttacccatgtgagagtaagtcatcgccagctcacaaataaaacgaaaggctcagtcgaaagactgggcctttcgttttatctgttgtttgtcggtgaacgctctcctgagtaggacaaatccgccgggagcggatttgaacgttgcgaagcaacggcccggagggtggcgggcaggacgcccgccataaactgccaggcatcaaattaagcagaaggccatcctgacggatggcctttttgcgtttctacaaactcttcctgtcgtcatatctacaagccggcgcgccgggaaatgtgcgcggaacccctatttgtttatttttctaaatacattcaaatatgtatccgctcatgagacaataaccctgataaatgcttcaataatattgaaaaaggaagagtatgagtattcaacatttccgtgtcgcccttattcccttttttgcggcattttgccttcctgtttttgctcacccagaaacgctggtgaaagtaaaagatgctgaagatcagttgggtgcacgagtgggttacatcgaactggatctcaacagcggtaagatccttgagagttttcgccccgaagaacgttttccaatgatgagcacttttaaagttctgctatgtggcgcggtattatcccgtgttgacgccgggcaagagcaactcggtcgccgcatacactattctcagaatgacttggttgagtactcaccagtcacagaaaagcatcttacggatggcatgacagtaagagaattatgcagtgctgcaataaccatgagtgataacactgcggccaacttacttctgacaacgatcggaggaccgaaggagctaaccgcttttttgcacaacatgggggatcatgtaactcgccttgatcgttgggaaccggagctgaatgaagccataccaaacgacgagcgtgacaccacgatgcctgcagcaatggcaacaacgttgcgcaaactattaactggcgaactacttactctagcttcccggcaacaattaatagactggatggaggcggataaagttgcaggaccacttctgcgctcggcccttccggctagctggtttattgctgataaatctggagccggtgagcgtgggtctcgcggtatcattgcagcactggggccagatggtaagccctcccgtatcgtagttatctacacgacggggagtcaggcaactatggatgaacgaaatagacagatcgctgagataggtgcctcactgattaagcattggtaactgcagaccaagtttactcatatatactttagattgatttaaaacttcatttttaatttaaaaggatctaggtgaagatcctttttgataatctcatgaccaaaatcccttaacgtgagttttcgttccactgagcgtcagaccccgtagaaaagatcaaaggatcttcttgagatcctttttttctgcgcgtaatctgctgcttgcaaacaaaaaaaccaccgctaccagcggtggtttgtttgccggatcaagagctaccaactctttttccgaaggtaactggcttcagcagagcgcagataccaaatactgtccttctagtgtagccgtagttaggccaccacttcaagaactctgtagcaccgcctacatacctcgctctgctaatcctgttaccagtggctgctgccagtggcgataagtcgtgtcttaccgggttggactcaagacgatagttaccggataaggcgcagcggtcgggctgaacggggggttcgtgcacacagcccagcttggagcgaacgacctacaccgaactgagatacctacagcgtgagctatgagaaagcgccacgcttcccgaagggagaaaggcggacaggtatccggtaagcggcagggtcggaacaggagagcgcacgagggagcttccagggggaaacgcctggtatctttatagtcctgtcgggtttcgccacctctgacttgagcgtcgatttttgtgatgctcgtcaggggggcggagcctatggaaaaacgccagcaacgcggcctttttacggttcctggccttttgctgg

SEQ ID NO: 78 - DNA, 7651 bp, Artificial
  Synthetic
agacttagggaccctgcggccgccattaattcctaatttttgttgacactctatcattgatagagttattttaccactccctatcagtgatagagaaaagtgaaatgaatagaccggccgctgagaaaaagcgaagcggcttttactgattgattaatcgaaataattttcattgattgattggtttaaattactcgaagtttatttgagcgaaatttaagtcagtaattgatgagccagaattggcaccttgtctataaataaggtgcaaaatgattttaactgaagagtttgatcatggctcagattgaacgctggcggcaggcttaacacatgcaagtcgagcgggggaaggtagcttgctaccggacctagcggcggacgggtgagtaatgcttaggaatctgcctattagtgggggacaacatctcgaaagggatgctaataccgcatacgtcctacgggagaaagcaggggatcttcggaccttgcgctaatagatgagcctaagtcggattagctagttggtggggtaaaggcctaccaaggcgacgatctgtagcgggtctgagaggatgatccgccacactgggactgagacacggcccagactcctacgggaggcagcagtggggaatattggacaatgggcgcaagcctgatccagccatgccgcgtgtgtgaagaaggccttatggttgtaaagcactttaagcgaggaggaggctactttagataatacctagagatagtggacgttactcgcagaataagcaccggctaactctgtgccagcagccgcggtaatacagagggtgcaagcgttaatcggatttactgggcgtaaagcgcgcgtaggcggctaattaagtcaaatgtgaaatccccgagcttaacttgggaattgcattcgatactggttagctagagtgtgggagaggatggtagaattccaggtgtagcggtgaaatgcgtagagatctggaggaataccgatggcgaaggcagccatctggcctaacactgacgctgaggtgcgaaagcatggggagcaaacaggattagataccctggtagtccatgccgtaaacgatgtctactagccgttggggcctttgaggctttagtggcgcagctaacgcgataagtagaccgcctggggagtacggtcgcaagactaaaactcaaatgaattgacgggggcccgcacaagcggtggagcatgtggtttaattcgatgcaacgcgaagaaccttacctggccttgacatagtaagaactttccagagatggattggtgccttcgggaacttacatacaggtgctgcatggctgtcgtcagctcgtgtcgtgagatgttgggttaagtcccgcaacgagcgcaacccttttccttatttgccagcgagtaatgtcgggaactttaaggatactgccagtgacaaactggaggaaggcggggacgacgtcaagtcatcatggcccttacggccagggctacacacgtgctacaatggtcggtacaaagggttgctacacagcgatgtgatgctaatctcaaaaagccgatcgtagtccggattggagtctgcaactcgactccatgaagtcggaatcgctagtaatcgcggatcagaatgccgcggtgaatacgttcccgggccttgtacacaccgcccgtcacaccatgggagtttgttgcaccagaagtagctagcctaactgcaaagagggcggttaccacggtgtggccgatgactggggtgaagtcgtaacaaggtagccgtaggggaacctgcggctggatcatgtggtatacgaaagattgacgattggtaagaatccacaacaagttgttcttcatagatgtatctgagggtctgtagctcagttggttagagcacacgcttgataagcgtggggtcacaagttcaagtcttgtcagacccaccatgactttgactggttaaagttatagataaaagatacatgactgatgatgtaagctggggacttagcttagttggtagagcgcctgctttgcacgcaggaggtcaggagttcgactctcctagtctccaccagaacttaagataagttcggattacagaaattagtaaatagagatttcggtcttggtttattaacttctgtgatttaagtatcacggtattaagcatgacctgacgaaggcgtgtttattcattaacagattggcaaaattgagtctgaaataaattgttcactcaataacaaagagagacgaagtaattctgatcttggagttaattgagaactagcaaattaactgaatcaagcgttttggtatatgaatttagattgaagctgtacagtgtttaaatacacagtgctctaaactgaaatgttgaagttactaacttgtaggtaacgtcgactgtttggggttgtatagtcaagtaattaagtgcatgtggtggatgccttggcagtcagaggcgatgaaagacgtgatagcctgcgaaaagctccggggaggcggcaaatatcctttgatccggagatgtctgaatgggggaacccacctactttaaggtaggtattgcaacatgaatacatagtgttgcaaggcgaacgaggggaagtgaaacatctcagtacccttaggaaaagaaatcaattgagattccctcagtagcggcgagcgaacggggatcagcccattaagttatgtgtgttttagtggaacgctctgggaagtgcgaacgtagagggtgatattcccgtacacgaaagggcacacataatgatgacgagtagggcgaggcacgtgaaaccttgtctgaatatggggggaccatcctccaaggctaaatactcctgactgaccgatagtgaaccagtaccgtgagggaaaggcgaaaagaacccctgtgaggggagtgaaatagatcctgaaaccgcatgcatacaagcagtgggagcaccttcgtggtgtgactgcgtaccttttgtataatgggtcagcgacttatattcagtagcgaggttaaccgtataggggagccgtagagaaatcgagtcttaatagggcgtttagttgctgggtatagacccgaaaccaggcgatctatccatgagcaggttgaaggttgggtaacactaactggaggaccgaacccactgtcgttgaaaagccaggggatgacttgtggataggggtgaaaggctaatcaagcctggtgatagctggttctccccgaaagctatttaggtagcgcctcggacgaataccatagggggtagagcactgtttcggctagggggtcatcccgacttaccaaaccgatgcaaactccgaatacctatgagtactatccgggagacagactgcgggtgctaacgtccgtagtcaagaggaaaacaatccagaccgccagctaaggccccaaaatcatagttaagtgggaaacgatgtgggaaggcatagacagctaggaggttggcttagaagcagccaccctttaaagaaagcgtaatagctcactagtcgagtcggcctgcgcggaagatgtaacggggctaaaactatgtgccgaagctgcggatttgacattagtcaagtggtaggggagcgttctgtaagccgatgaaggtgtattgagaagtatgctggaggtatcagaagtgcgaatgctgacgtgagtaacgacaaaacgggtgaaaaacccgttcgccgaaagaccaagggttccagtccaacgttaatcggggctgggtgagtcgacccctaaggcgaggccgaaaggcgtagtcgatgggaaattggttaatattccaatacttctgtgtaatgcgatgagaggacggagaaggttaagtcagcctggcgttggttgtccaggtggaaggatgtaggtatgtatcttaggcaaatccggggtactctatactgagatccgatagcaagctgtacttgtacagcgaagtggctgataccatgcttccaggaaaagtctctaagcttcagttacacaggaatcgtacccgaaaccgacacaggtggtcaggtcgagtagaccaaggcgcttgagagaactctgctgaaggaactaggcaaaatggtaccgtaacttcgggagaaggtacgctgttgttggtgatggaacttgcttcctgagctgatgacagccgcagaaaccaggccgctgcaactgtttattaaaaacatagcactctgcaaacacgaaagtggacgtatagggtgtgatgcctgcccggtgctggaaggttaattgatggggttagcgtaagcgaagctcttgatcgaagccccagtaaacggcggccgtaactataacggtcctaaggtagcgaaattccttgtcgggtaagttccgacctgcacgaatggcataatgatggcggcgctgtctccagcagaggctcagtgaaatcgaaatcgctgtgaagatgcagtgtacccgcggctagacggaaagaccccgtgaacctttactgcagcttgacactgaactttgaccttacttgtgtaggataggtgggaggctttgaagttggaacgctagttccaatggagccgtccttgaaataccaccctggtaatgttgaggttctaactctgtcccgttatccgggacgaggaccgtgtctggtgggtagtttgactggggcggtctcctcctaaagagtaacggaggagtacgaaggtgcgctcagcgtggtcggaaatcacgcatagagtataaaggcaaaagcgcgcttaactgcgagacccacaagtcgagcaggtacgaaagtaggtcttagtgatccggtggttctgtatggaagggccatcgctcaacggataaaaggtactctggggataacaggctgataccgcccaagagttcatatcgacggcggtgtttggcacctcgatgtcggctcatctcatcctggggctgaagcaggtcccaagggtatggctgttcgccatttaaagaggtacgcgagctgggtttagaacgtcgtgagacagttcggtccctatctaccgtgggcgctggaaatttgagaggatctgctcctagtacgagaggaccagagtggacgaacctctggtgtaccggttgtgacgccagtcgcatcgccgggtagctatgttcggaagggataaccgctgaaagcatctaagcgggaagcctacctcaagataagatttccctaggaatttattcctctaaagagccgttcgagactaggacgttgataggttggatgtggaagcatagtgatatgtgaagctgaccaatactaattgctcgtgaggcttgactatacaacacccaagcagttgtatacaaagtatcaatcgattcataaatctacaaacaaacttgatttagttattccactagataaaatgaacacagtcagattcaatcagcccaatctgtaaagatttggaaaacgcttcggcagtcaataagaccaaagcaagtatccataaacagttgtgctggcgaccatagcaagagtgaaccacctgatcccttcccgaactcagaagtgaaacctcttagcgctgatggtagtgtggggttacccatgtgagagtaagtcatcgccagctcattattctaaacacccccattctaaagagtgggggtgttttttattgcgcgaaataaagtgaaaatttaattcatgaagcaataatcttttttgattatcctcaatcgatcattagatataactcaaaataaccttaatattattttagaagattaaattactacttttctcatgaaatgctgagtcaatatataggataaaccattactatatgctataaataatgaataggcatgatttttgcttgcgcgccgggaaatgtgcgcggaacccctatttgtttatttttctaaatacattcaaatatgtatccgctcatgagacaataaccctgataaatgcttcaataatattgaaaaaggaagagtatgagtattcaacatttccgtgtcgcccttattcccttttttgcggcattttgccttcctgtttttgctcacccagaaacgctggtgaaagtaaaagatgctgaagatcagttgggtgcacgagtgggttacatcgaactggatctcaacagcggtaagatccttgagagttttcgccccgaagaacgttttccaatgatgagcacttttaaagttctgctatgtggcgcggtattatcccgtgttgacgccgggcaagagcaactcggtcgccgcatacactattctcagaatgacttggttgagtactcaccagtcacagaaaagcatcttacggatggcatgacagtaagagaattatgcagtgctgcaataaccatgagtgataacactgcggccaacttacttctgacaacgatcggaggaccgaaggagctaaccgcttttttgcacaacatgggggatcatgtaactcgccttgatcgttgggaaccggagctgaatgaagccataccaaacgacgagcgtgacaccacgatgcctgcagcaatggcaacaacgttgcgcaaactattaactggcgaactacttactctagcttcccggcaacaattaatagactggatggaggcggataaagttgcaggaccacttctgcgctcggcccttccggctagctggtttattgctgataaatctggagccggtgagcgtgggtctcgcggtatcattgcagcactggggccagatggtaagccctcccgtatcgtagttatctacacgacggggagtcaggcaactatggatgaacgaaatagacagatcgctgagataggtgcctcactgattaagcattggtaactgcagaccaagtttactcatatatactttagattgatttaaaacttcatttttaatttaaaaggatctaggtgaagatcctttttgataatctcatgaccaaaatcccttaacgtgagttttcgttccactgagcgtcagaccccgtagaaaagatcaaaggatcttcttgagatcctttttttctgcgcgtaatctgctgcttgcaaacaaaaaaaccaccgctaccagcggtggtttgtttgccggatcaagagctaccaactctttttccgaaggtaactggcttcagcagagcgcagataccaaatactgtccttctagtgtagccgtagttaggccaccacttcaagaactctgtagcaccgcctacatacctcgctctgctaatcctgttaccagtggctgctgccagtggcgataagtcgtgtcttaccgggttggactcaagacgatagttaccggataaggcgcagcggtcgggctgaacggggggttcgtgcacacagcccagcttggagcgaacgacctacaccgaactgagatacctacagcgtgagctatgagaaagcgccacgcttcccgaagggagaaaggcggacaggtatccggtaagcggcagggtcggaacaggagagcgcacgagggagcttccagggggaaacgcctggtatctttatagtcctgtcgggtttcgccacctctgacttgagcgtcgatttttgtgatgctcgtcaggggggcggagcctatggaaaaacgccagcaacgcggcctttttacggttcctggccttttgctgg

SEQ ID NO: 79 - DNA, 7668 bp, Artificial
  Synthetic
agacttagggaccctgcggccgccattaattcctaatttttgttgacactctatcattgatagagttattttaccactccctatcagtgatagagaaaagtgaaatgaatagaccggccgctgagaaaaagcgaagcggcgaatgagcgagtcgaacccttcggggatcgccacaagtttgtatcaagtgctcacaaacgaaagatgaagaattaccttgtgtaactctgaatttttctttgagacacaatcggtctcgtcgcaagacgggacaaccacagagattaaactgaagagtttgatcctggctcagattgaacgctagcgggatgctttacacatgcaagtcgaacggcagcgcgagagagcttgctctcttggcggcgagtggcggacgggtgagtaatatatcggaacgtgcccagtagcgggggataactactcgaaagagtggctaataccgcatacgccctacgggggaaagggggggatcgcaagacctctcactattggagcggccgatatcggattagctagttggtggggtaaaggctcaccaaggcaacgatccgtagctggtttgagaggacgaccagccacactgggactgagacacggcccagactcctacgggaggcagcagtggggaattttggacaatgggggaaaccctgatccagccatcccgcgtgtatgatgaaggccttcgggttgtaaagtacttttggcagagaagaaaaggtacctcctaatacgaggtactgctgacggtatctgcagaataagcaccggctaactacgtgccagcagccgcggtaatacgtagggtgcaagcgttaatcggaattactgggcgtaaagcgtgtgtaggcggttcggaaagaaagatgtgaaatcccagggctcaaccttggaactgcatttttaactgccgagctagagtatgtcagaggggggtagaattccacgtgtagcagtgaaatgcgtagatatgtggaggaataccgatggcgaaggcagccccctgggataatactgacgctcagacacgaaagcgtggggagcaaacaggattagataccctggtagtccacgccctaaacgatgtcaactagctgttggggccgttaggccttagtagcgcagctaacgcgtgaagttgaccgcctggggagtacggtcgcaagattaaaactcaaaggaattgacggggacccgcacaagcggtggatgatgtggattaattcgatgcaacgcgaaaaaccttacctacccttgacatgtctggaaagccgaagagatttggccgtgctcgcaagagaaccggaacacaggtgctgcatggctgtcgtcagctcgtgtcgtgagatgttgggttaagtcccgcaacgagcgcaacccttgtcattagttgctacgcaagagcactctaatgagactgccggtgacaaaccggaggaaggtggggatgacgtcaagtcctcatggcccttatgggtagggcttcacacgtcatacaatggtcgggacagagggtcgccaacccgcgagggggagccaatctcagaaacccgatcgtagtccggatcgcagtctgcaactcgactgcgtgaagtcggaatcgctagtaatcgcggatcagaatgtcgcggtgaatacgttcccgggtcttgtacacaccgcccgtcacaccatgggagtgggtttcaccagaagtaggtagcctaaccgtaaggagggcgcttaccacggtgggattcatgactggggtgaagtcgtaacaaggtagccgtatcggaaggtgcggctggatcacctccttttagagcgaatggctcgcaaagcgaaagcgtccacacttattggctgttagttaatgtcatgaccattgaaggtatcgcccactggtgatagatgggtcagtagctcagtcggttagagcaccgtcttgataaggcgggggtcgttggttcgattccaacttgacccaccaacgattacctcgggggattagctcagctgggagagcacctgctttgcaagcagggggtcgtcggttcgatcccgtcatcctccaccaccgcttttgtggatggttgtcgatacagcaaggttcatgacagagtatagggcacaggacaacaacggttgacctggcgctagattcaacgaagagtgttctttttaaagaatactgctcgttgggttatgcaacccacgaattgctctttaacaattaggaagaagcacaacgaaggtgtgttgtctaataaacgcaaagcgattagtcgccttgtgatgacaatacacgggttgtgattgcaacagaacaaattatgttcaacgaaagttctcaaaaatatagacgttgttcgatcttcggattggatgacagctaaggattgatgaacggcaacaacgtatactcatattcctataacagcatcaagcgttataggatcaagcgaataagtgcatatgatggatgccttggcgatcacaggcgatgaaggacgcggtagcctgcgaaaagctacggggagctggcaaacaagctttgatccgtagatgtccgaatggggaaacccaccgtagtaatacggtatcccatgctcaatacataggcatgtggaggcgaacccgagtgaactgaaccatctcagtaactcgaggaaaagaaatcaaccgagattccggaagtagtggcgagcgaaaccggaccagcctggatgttttagcgtagtgaatagtcgaatggaatggaaagtccagccgtagcaggtgatagccctgtaggcgaaattcagtacgtggaactaagcatcgaacaagtagggcgggacacgtgaaatcctgtctgaatatggggggaccatcctccaaggctaaatactcgtgatcgaccgatagtgaaccagtaccgtgagggaaaggcgaaaagaaccccggaaggggagtgaaatagatcctgaaatcgtatgcatacaaacagtaggagcaccttcgtggtgtgactgcgtaccttttgtataatgggtcagcgacttacattcagtggcaagcttaaccgaataggggaggcgtagcgaaagcgagtccgaatagggcgattcagtcgctgggtgtagacccgaaaccaggcgatctatccatggccaggttgaaggcacggtaacacgtgctggaggaccgaacccactaatgttgaaaaattaggggatgagctgtggatcggagtgaaaggctaaacaagcctggagatagctggttctctccgaaaactatttaggtagtgcctcgtatattactgccgggggtagagcactgttatggctagggggtcacagcgacttaccaacccatggcaaactccgaataccggcaagtacagtacgggagacagagcaccgggtgctaacgtccggactcaagagggaaacaacccagaccgccagctaaggtccctaactatggctaagtgggaaacgaagtgggaaggcatagacagtcaggaggttggcttagaagcagccatcctttaaagaaagcgtaatagctcactgatcgagtcgtcctgcgcggaagatgtaacggggctaagccatagaccgaagctgcggatgtgtactatgtacacatggtaggagagcgttccgtaagcctgtgaaggtgttccgtgaggaatgctggaggtatcggaagtgagaatgctgacatgagtagcgataaagggggtgaaaagccccctcgccgtaagtccaaggtttcctgcgcaacgttcatcggcgcagggtgagtcggcccctaaggcgaggcagagatgcgtagctgatgggaagcgggttaatattcccgcaccgtcgtagagtgcgatggggggacggattgcagaatgttatcggggtgttggatgtccccgttggcgcatcatagaaggcacttaggcaaatccgggtgcgtaattcaagggtgtgactggatagagcttcggctctaaactaactggaagcagttccaagaaaagcctctaagcttcagctctacgagaccgtaccgcaaaccgacacaggtggacgggatgaatattccaaggcgcttgagagaactcaggagaaggaactcggcaaattaataccgtaacttcgggagaaggtatgcctcattagtgtgatgtgcctgcgcacaaagcatgaagaggccgcagtgaatcggtggctgcgactgtttactaaaaacacagcactctgcaaacacgaaagtggacgtatagggtgtgacgcctgcccggtgccggaaggttaagtgatggggtgcaagctcttgatcgaagccccggtaaacggcggccgtaactataacggtcctaaggtagcgaaattccttgtcgggtaagttccgacctgcacgaatggcgtaacgatggccacactgtctcctcctgagactcagcgaagttgacatggttgtgatgatgcaatctccccgcggctagacggaaagaccccatgaacctttactgtagctttgcattggattgtgaaccggcctgtgtaggataggtgggagacgttgaagcgtggtcgccagatcgcgtggagtcatccttgaaataccaccctggtctgtttgcggttctaacctaggtcccttatcgggatcggggaccgtgcatggtgggcagtttgactggggcggtctcctcctaaagtgtaacggaggagttcgaaggtacgctagagacggtcggaaatcgtcttgatagtgcaatggcataagcgtgcttgactgtgagactgacaagtcgaacaggtacgaaagtaggacatagtgatccggtggttctgtatggaagggccatcgctcaacggataaaaggtactctggggataacaggctgataccgcccaagagttcatatcgacggcggtgtttggcacctcgatgtcggctcatctcatcctggggctgtagccggtcccaagggtatggctgttcgccatttaaagaggtacgtgagctgggtttaaaacgtcgtgagacagtttggtccctatctgccgtgggcgttggatatttgacggagcctgctcctagtacgagaggaccggagtggacgtaccactggtgtatcggttgtcatgccaatggcattgccgagtagctacgtacggaagagataaccgctgaaggcatctaagcgggaaactcgtctgaagattagatatcccggaggcttgacctccctgtagggtcgtccgagaccaggacgttgataggctgggtgtggaagtgcagtaatgcatgtagctaaccagtactaattgcccgtgtggcttgatcctataacccttgaggttgtagtgagttaagttgttgaccacagaacgtaatattgaagtgcagcgcaacccgcgctcgacaccttcgtaaccgctgctagctgatccgtactgatcgctagtggtgtgcttcttccaattggctggggcgtcccttaaaaagacgactcggcaaccagttacgcttgacgaccatagcgaggtggtcccacaccttcccatcccgaacaggattgtgaaacgcctttgcgccgatgatagtggacggacgtctgtgaaagtaggtcatcgtcaagctcttattcctcaaaacccccgcaagcgcaccgcttgcgggggttttgttttatgcgtcgccaacgcacaggccagcggcacgccctgatggcatacaagcctgatctcctctgaaattcctactcagtttctcctttgcgccgtagaatacggataaatactttagagctaaaggagttgcccgtgggtgcagagacagtagtagatgcgattgtggttggggcagggcacaatggcttggcagcagcgcgccgggaaatgtgcgcggaacccctatttgtttatttttctaaatacattcaaatatgtatccgctcatgagacaataaccctgataaatgcttcaataatattgaaaaaggaagagtatgagtattcaacatttccgtgtcgcccttattcccttttttgcggcattttgccttcctgtttttgctcacccagaaacgctggtgaaagtaaaagatgctgaagatcagttgggtgcacgagtgggttacatcgaactggatctcaacagcggtaagatccttgagagttttcgccccgaagaacgttttccaatgatgagcacttttaaagttctgctatgtggcgcggtattatcccgtgttgacgccgggcaagagcaactcggtcgccgcatacactattctcagaatgacttggttgagtactcaccagtcacagaaaagcatcttacggatggcatgacagtaagagaattatgcagtgctgcaataaccatgagtgataacactgcggccaacttacttctgacaacgatcggaggaccgaaggagctaaccgcttttttgcacaacatgggggatcatgtaactcgccttgatcgttgggaaccggagctgaatgaagccataccaaacgacgagcgtgacaccacgatgcctgcagcaatggcaacaacgttgcgcaaactattaactggcgaactacttactctagcttcccggcaacaattaatagactggatggaggcggataaagttgcaggaccacttctgcgctcggcccttccggctagctggtttattgctgataaatctggagccggtgagcgtgggtctcgcggtatcattgcagcactggggccagatggtaagccctcccgtatcgtagttatctacacgacggggagtcaggcaactatggatgaacgaaatagacagatcgctgagataggtgcctcactgattaagcattggtaactgcagaccaagtttactcatatatactttagattgatttaaaacttcatttttaatttaaaaggatctaggtgaagatcctttttgataatctcatgaccaaaatcccttaacgtgagttttcgttccactgagcgtcagaccccgtagaaaagatcaaaggatcttcttgagatcctttttttctgcgcgtaatctgctgcttgcaaacaaaaaaaccaccgctaccagcggtggtttgtttgccggatcaagagctaccaactctttttccgaaggtaactggcttcagcagagcgcagataccaaatactgtccttctagtgtagccgtagttaggccaccacttcaagaactctgtagcaccgcctacatacctcgctctgctaatcctgttaccagtggctgctgccagtggcgataagtcgtgtcttaccgggttggactcaagacgatagttaccggataaggcgcagcggtcgggctgaacggggggttcgtgcacacagcccagcttggagcgaacgacctacaccgaactgagatacctacagcgtgagctatgagaaagcgccacgcttcccgaagggagaaaggcggacaggtatccggtaagcggcagggtcggaacaggagagcgcacgagggagcttccagggggaaacgcctggtatctttatagtcctgtcgggtttcgccacctctgacttgagcgtcgatttttgtgatgctcgtcaggggggcggagcctatggaaaaacgccagcaacgcggcctttttacggttcctggccttttgctgg

SEQ ID NO: 80 - DNA, 7390 bp, Artificial
  Synthetic
agacttagggaccctgcggccgccattaattcctaatttttgttgacactctatcattgatagagttattttaccactccctatcagtgatagagaaaagtgaaatgaatagaccggccgctgagaaaaagcgaagcggcactgctctttaacaatttatcagacaatctgtgtgggcactcgaagatacggattcttaacgtcgcaagacgaaaaatgaataccaagtctcaagagtgaacacgtaattcattacgaagtttaattctttgagcgtcaaacttttaaactgaagagtttgatcctggctcagattgaacgctagcgggatgctttacacatgcaagtcgaacggcagcgcgagagagcttgctctcttggcggcgagtggcggacgggtgagtaatatatcggaacgtgcccagtagcgggggataactactcgaaagagtggctaataccgcatacgccctacgggggaaagggggggatcgcaagacctctcactattggagcggccgatatcggattagctagttggtggggtaaaggctcaccaaggcaacgatccgtagctggtttgagaggacgaccagccacactgggactgagacacggcccagactcctacgggaggcagcagtggggaattttggacaatgggggaaaccctgatccagccatcccgcgtgtatgatgaaggccttcgggttgtaaagtacttttggcagagaagaaaaggtacctcctaatacgaggtactgctgacggtatctgcagaataagcaccggctaactacgtgccagcagccgcggtaatacgtagggtgcaagcgttaatcggaattactgggcgtaaagcgtgtgtaggcggttcggaaagaaagatgtgaaatcccagggctcaaccttggaactgcatttttaactgccgagctagagtatgtcagaggggggtagaattccacgtgtagcagtgaaatgcgtagatatgtggaggaataccgatggcgaaggcagccccctgggataatactgacgctcagacacgaaagcgtggggagcaaacaggattagataccctggtagtccacgccctaaacgatgtcaactagctgttggggccgttaggccttagtagcgcagctaacgcgtgaagttgaccgcctggggagtacggtcgcaagattaaaactcaaaggaattgacggggacccgcacaagcggtggatgatgtggattaattcgatgcaacgcgaaaaaccttacctacccttgacatgtctggaaagccgaagagatttggccgtgctcgcaagagaaccggaacacaggtgctgcatggctgtcgtcagctcgtgtcgtgagatgttgggttaagtcccgcaacgagcgcaacccttgtcattagttgctacgcaagagcactctaatgagactgccggtgacaaaccggaggaaggtggggatgacgtcaagtcctcatggcccttatgggtagggcttcacacgtcatacaatggtcgggacagagggtcgccaacccgcgagggggagccaatctcagaaacccgatcgtagtccggatcgcagtctgcaactcgactgcgtgaagtcggaatcgctagtaatcgcggatcagaatgtcgcggtgaatacgttcccgggtcttgtacacaccgcccgtcacaccatgggagtgggtttcaccagaagtaggtagcctaaccgtaaggagggcgcttaccacggtgggattcatgactggggtgaagtcgtaacaaggtagccgtatcggaaggtgcggctggatcacctcctttccttaaagaagcgtactttgtagtgctcacacagattgtctgatagaaagtgaaaagcaaggcgtttacgcgttgggagtgaggctgaagagaataaggccgttcgctttctattaatgaaagctcaccctacacgaaaatatcacgcaacgcgtgataagcaattttcgtgtccccttcgtctagaggcccaggacaccgccctttcacggcggtaacaggggttcgaatcccctaggggacgccacttgctggtttgtgagtgaaagtcgccgaccttaatatctcaaaactcatcttcgggtgatgtttgagatatttgctctttaaaaatctggatcaagctgaaaattgaaacactgaacaacgagagttgttcgtgagtctctcaaattttcgcaacacgatgatgaatcgaaagaaacatcttcgggttgtgagatcaagcgaataagtgcatatgatggatgccttggcgatcacaggcgatgaaggacgcggtagcctgcgaaaagctacggggagctggcaaacaagctttgatccgtagatgtccgaatggggaaacccaccgtagtaatacggtatcccatgctcaatacataggcatgtggaggcgaaccgagtgaactgaaccatctcagtaactcgaggaaaagaaatcaaccgagattccggaagtagtggcgagcgaaaccggaccagcctggatgttttagcgtagtgaatagtcgaatggaatggaaagtccagccgtagcaggtgatagccctgtaggcgaaattcagtacgtggaactaagcatcgaacaagtagggcgggacacgtgaaatcctgtctgaatatggggggaccatcctccaaggctaaatactcgtgatcgaccgatagtgaaccagtaccgtgagggaaaggcgaaaagaaccccggaaggggagtgaaatagatcctgaaatcgtatgcatacaaacagtaggagcaccttcgtggtgtgactgcgtaccttttgtataatgggtcagcgacttacattcagtggcaagcttaaccgaataggggaggcgtagcgaaagcgagtccgaatagggcgattcagtcgctgggtgtagacccgaaaccaggcgatctatccatggccaggttgaaggcacggtaacacgtgctggaggaccgaacccactaatgttgaaaaattaggggatgagctgtggatcggagtgaaaggctaaacaagcctggagatagctggttctctccgaaaactatttaggtagtgcctcgtatattactgccgggggtagagcactgttatggctagggggtcacagcgacttaccaacccatggcaaactccgaataccggcaagtacagtacgggagacagagcaccgggtgctaacgtccggactcaagagggaaacaacccagaccgccagctaaggtccctaactatggctaagtgggaaacgaagtgggaaggcatagacagtcaggaggttggcttagaagcagccatcctttaaagaaagcgtaatagctcactgatcgagtcgtcctgcgcggaagatgtaacggggctaagccatagaccgaagctgcggatgtgtactatgtacacatggtaggagagcgttccgtaagcctgtgaaggtgttccgtgaggaatgctggaggtatcggaagtgagaatgctgacatgagtagcgataaagggggtgaaaagccccctcgccgtaagtccaaggtttcctgcgcaacgttcatcggcgcagggtgagtcggcccctaaggcgaggcagagatgcgtagctgatgggaagcgggttaatattcccgcaccgtcgtagagtgcgatggggggacggattgcagaatgttatcggggtgttggatgtccccgttggcgcatcatagaaggcacttaggcaaatccgggtgcgtaattcaagggtgtgactggatagagcttcggctctaaactaactggaagcagttccaagaaaagcctctaagcttcagctctacgagaccgtaccgcaaaccgacacaggtggacgggatgaatattccaaggcgcttgagagaactcaggagaaggaactcggcaaattaataccgtaacttcgggagaaggtatgcctcattagtgtgatgtgcctgcgcacaaagcatgaagaggccgcagtgaatcggtggctgcgactgtttactaaaaacacagcactctgcaaacacgaaagtggacgtatagggtgtgacgcctgcccggtgccggaaggttaagtgatggggtgcaagctcttgatcgaagccccggtaaacggcggccgtaactataacggtcctaaggtagcgaaattccttgtcgggtaagttccgacctgcacgaatggcgtaacgatggccacactgtctcctcctgagactcagcgaagttgacatggttgtgatgatgcaatctccccgcggctagacggaaagaccccatgaacctttactgtagctttgcattggattgtgaaccggcctgtgtaggataggtgggagacgttgaagcgtggtcgccagatcgcgtggagtcatccttgaaataccaccctggtctgtttgcggttctaacctaggtcccttatcgggatcggggaccgtgcatggtgggcagtttgactggggcggtctcctcctaaagtgtaacggaggagttcgaaggtacgctagagacggtcggaaatcgtcttgatagtgcaatggcataagcgtgcttgactgtgagactgacaagtcgaacaggtacgaaagtaggacatagtgatccggtggttctgtatggaagggccatcgctcaacggataaaaggtactctggggataacaggctgataccgcccaagagttcatatcgacggcggtgtttggcacctcgatgtcggctcatctcatcctggggctgtagccggtcccaagggtatggctgttcgccatttaaagaggtacgtgagctgggtttaaaacgtcgtgagacagtttggtccctatctgccgtgggcgttggatatttgacggagcctgctcctagtacgagaggaccggagtggacgtaccactggtgtatcggttgtcatgccaatggcattgccgagtagctacgtacggaagagataaccgctgaaggcatctaagcgggaaactcgtctgaagattagatatcccggaggcttgacctccctgtagggtcgtccgagaccaggacgttgataggctgggtgtggaagtgcagtaatgcatgtagctaaccagtactaattgcccgtgtggcttgatcctacaacgccgaagctgttttggcggatgagagaagattttcagcctgatacagattaaatcagaacgcagaagcggtctgataaaacagaatttcgcttgacgaccatagcgaggtggtcccacaccttcccatcccgaacaggattgtgaaacgcctttgcgccgatgatagtggacggacgtctgtgaaagtaggtcatcgtcaagctccaaataaaacgaaaggctcagtcgaaagactgggcctttcgttttatctgttgtttgtcggtgaacgctctcctgagtaggacaaatccgccgggagcggatttgaacgttgcgaagcaacggcccggagggtggcgggcaggacgcccgccataaactgccaggcatcaaattaagcagaaggccatcctgacggatggcctttttgcgtttctacaaactcttcctgtcgtcatatctacaagccggcgcgccgggaaatgtgcgcggaacccctatttgtttatttttctaaatacattcaaatatgtatccgctcatgagacaataaccctgataaatgcttcaataatattgaaaaaggaagagtatgagtattcaacatttccgtgtcgcccttattcccttttttgcggcattttgccttcctgtttttgctcacccagaaacgctggtgaaagtaaaagatgctgaagatcagttgggtgcacgagtgggttacatcgaactggatctcaacagcggtaagatccttgagagttttcgccccgaagaacgttttccaatgatgagcacttttaaagttctgctatgtggcgcggtattatcccgtgttgacgccgggcaagagcaactcggtcgccgcatacactattctcagaatgacttggttgagtactcaccagtcacagaaaagcatcttacggatggcatgacagtaagagaattatgcagtgctgcaataaccatgagtgataacactgcggccaacttacttctgacaacgatcggaggaccgaaggagctaaccgcttttttgcacaacatgggggatcatgtaactcgccttgatcgttgggaaccggagctgaatgaagccataccaaacgacgagcgtgacaccacgatgcctgcagcaatggcaacaacgttgcgcaaactattaactggcgaactacttactctagcttcccggcaacaattaatagactggatggaggcggataaagttgcaggaccacttctgcgctcggcccttccggctagctggtttattgctgataaatctggagccggtgagcgtgggtctcgcggtatcattgcagcactggggccagatggtaagccctcccgtatcgtagttatctacacgacggggagtcaggcaactatggatgaacgaaatagacagatcgctgagataggtgcctcactgattaagcattggtaactgcagaccaagtttactcatatatactttagattgatttaaaacttcatttttaatttaaaaggatctaggtgaagatcctttttgataatctcatgaccaaaatcccttaacgtgagttttcgttccactgagcgtcagaccccgtagaaaagatcaaaggatcttcttgagatcctttttttctgcgcgtaatctgctgcttgcaaacaaaaaaaccaccgctaccagcggtggtttgtttgccggatcaagagctaccaactctttttccgaaggtaactggcttcagcagagcgcagataccaaatactgtccttctagtgtagccgtagttaggccaccacttcaagaactctgtagcaccgcctacatacctcgctctgctaatcctgttaccagtggctgctgccagtggcgataagtcgtgtcttaccgggttggactcaagacgatagttaccggataaggcgcagcggtcgggctgaacggggggttcgtgcacacagcccagcttggagcgaacgacctacaccgaactgagatacctacagcgtgagctatgagaaagcgccacgcttcccgaagggagaaaggcggacaggtatccggtaagcggcagggtcggaacaggagagcgcacgagggagcttccagggggaaacgcctggtatctttatagtcctgtcgggtttcgccacctctgacttgagcgtcgatttttgtgatgctcgtcaggggggcggagcctatggaaaaacgccagcaacgcggcctttttacggttcctggccttttgctgg

SEQ ID NO: 81 - DNA, 7667 bp, Artificial
  Synthetic
agacttagggaccctgcggccgccattaattcctaatttttgttgacactctatcattgatagagttattttaccactccctatcagtgatagagaaaagtgaaatgaatagaccggccgctgagaaaaagcgaagcggcgaatgagcgagtcgaacccttcggggatcgccacaagtttgtatcaagtgctcacaaacgaaagatgaagaattaccttgtgtaactctgaatttttctttgagacacaatcggtctcgtcgcaagacgggacaaccacagagattaaactgaagagtttgatcctggctcagattgaacgctagcgggatgctttacacatgcaagtcgaacggcagcgcgagagagcttgctctcttggcggcgagtggcggacgggtgagtaatatatcggaacgtgcccagtagcgggggataactactcgaaagagtggctaataccgcatacgccctacgggggaaagggggggatcgcaagacctctcactattggagcggccgatatcggattagctagttggtggggtaaaggctcaccaaggcaacgatccgtagctggtttgagaggacgaccagccacactgggactgagacacggcccagactcctacgggaggcagcagtggggaattttggacaatgggggaaaccctgatccagccatcccgcgtgtatgatgaaggccttcgggttgtaaagtacttttggcagagaagaaaaggtacctcctaatacgaggtactgctgacggtatctgcagaataagcaccggctaactacgtgccagcagccgcggtaatacgtagggtgcaagcgttaatcggaattactgggcgtaaagcgtgtgtaggcggttcggaaagaaagatgtgaaatcccagggctcaaccttggaactgcatttttaactgccgagctagagtatgtcagaggggggtagaattccacgtgtagcagtgaaatgcgtagatatgtggaggaataccgatggcgaaggcagccccctgggataatactgacgctcagacacgaaagcgtggggagcaaacaggattagataccctggtagtccacgccctaaacgatgtcaactagctgttggggccgttaggccttagtagcgcagctaacgcgtgaagttgaccgcctggggagtacggtcgcaagattaaaactcaaaggaattgacggggacccgcacaagcggtggatgatgtggattaattcgatgcaacgcgaaaaaccttacctacccttgacatgtctggaaagccgaagagatttggccgtgctcgcaagagaaccggaacacaggtgctgcatggctgtcgtcagctcgtgtcgtgagatgttgggttaagtcccgcaacgagcgcaacccttgtcattagttgctacgcaagagcactctaatgagactgccggtgacaaaccggaggaaggtggggatgacgtcaagtcctcatggcccttatgggtagggcttcacacgtcatacaatggtcgggacagagggtcgccaacccgcgagggggagccaatctcagaaacccgatcgtagtccggatcgcagtctgcaactcgactgcgtgaagtcggaatcgctagtaatcgcggatcagaatgtcgcggtgaatacgttcccgggtcttgtacacaccgcccgtcacaccatgggagtgggtttcaccagaagtaggtagcctaaccgtaaggagggcgcttaccacggtgggattcatgactggggtgaagtcgtaacaaggtagccgtatcggaaggtgcggctggatcatgtggttttgagcgaatggctcgcaaagcgaaagcgtccacacttattggctgttagttaatgtcatgaccattgaaggtatcgcccactggtgatagatgggtcagtagctcagtcggttagagcaccgtcttgataaggcgggggtcgttggttcgattccaacttgacccaccaacgattacctcgggggattagctcagctgggagagcacctgctttgcaagcagggggtcgtcggttcgatcccgtcatcctccaccaccgcttttgtggatggttgtcgatacagcaaggttcatgacagagtatagggcacaggacaacaacggttgacctggcgctagattcaacgaagagtgttctttttaaagaatactgctcgttgggttatgcaacccacgaattgctctttaacaattaggaagaagcacaacgaaggtgtgttgtctaataaacgcaaagcgattagtcgccttgtgatgacaatacacgggttgtgattgcaacagaacaaattatgttcaacgaaagttctcaaaaatatagacgttgttcgatcttcggattggatgacagctaaggattgatgaacggcaacaacgtatactcatattcctataacagcatcaagcgttataggatcaagcgaataagtgcatatgatggatgccttggcgatcacaggcgatgaaggacgcggtagcctgcgaaaagctacggggagctggcaaacaagctttgatccgtagatgtccgaatggggaaacccaccgtagtaatacggtatcccatgctcaatacataggcatgtggaggcgaacccgagtgaactgaaccatctcagtaactcgaggaaaagaaatcaaccgagattccggaagtagtggcgagcgaaaccggaccagcctggatgttttagcgtagtgaatagtcgaatggaatggaaagtccagccgtagcaggtgatagccctgtaggcgaaattcagtacgtggaactaagcatcgaacaagtagggcgggacacgtgaaatcctgtctgaatatggggggaccatcctccaaggctaaatactcgtgatcgaccgatagtgaaccagtaccgtgagggaaaggcgaaaagaaccccggaaggggagtgaaatagatcctgaaatcgtatgcatacaaacagtaggagcaccttcgtggtgtgactgcgtaccttttgtataatgggtcagcgacttacattcagtggcaagcttaaccgaataggggaggcgtagcgaaagcgagtccgaatagggcgattcagtcgctgggtgtagacccgaaaccaggcgatctatccatggccaggttgaaggcacggtaacacgtgctggaggaccgaacccactaatgttgaaaaattaggggatgagctgtggatcggagtgaaaggctaaacaagcctggagatagctggttctctccgaaaactatttaggtagtgcctcgtatattactgccgggggtagagcactgttatggctagggggtcacagcgacttaccaacccatggcaaactccgaataccggcaagtacagtacgggagacagagcaccgggtgctaacgtccggactcaagagggaaacaacccagaccgccagctaaggtccctaactatggctaagtgggaaacgaagtgggaaggcatagacagtcaggaggttggcttagaagcagccatcctttaaagaaagcgtaatagctcactgatcgagtcgtcctgcgcggaagatgtaacggggctaagccatagaccgaagctgcggatgtgtactatgtacacatggtaggagagcgttccgtaagcctgtgaaggtgttccgtgaggaatgctggaggtatcggaagtgagaatgctgacatgagtagcgataaagggggtgaaaagccccctcgccgtaagtccaaggtttcctgcgcaacgttcatcggcgcagggtgagtcggcccctaaggcgaggcagagatgcgtagctgatgggaagcgggttaatattcccgcaccgtcgtagagtgcgatggggggacggattgcagaatgttatcggggtgttggatgtccccgttggcgcatcatagaaggcacttaggcaaatccgggtgcgtaattcaagggtgtgactggatagagcttcggctctaaactaactggaagcagttccaagaaaagcctctaagcttcagctctacgagaccgtaccgcaaaccgacacaggtggacgggatgaatattccaaggcgcttgagagaactcaggagaaggaactcggcaaattaataccgtaacttcgggagaaggtatgcctcattagtgtgatgtgcctgcgcacaaagcatgaagaggccgcagtgaatcggtggctgcgactgtttactaaaaacacagcactctgcaaacacgaaagtggacgtatagggtgtgacgcctgcccggtgccggaaggttaagtgatggggtgcaagctcttgatcgaagccccggtaaacggcggccgtaactataacggtcctaaggtagcgaaattccttgtcgggtaagttccgacctgcacgaatggcgtaacgatggccacactgtctcctcctgagactcagcgaagttgacatggttgtgatgatgcaatctccccgcggctagacggaaagaccccatgaacctttactgtagctttgcattggattgtgaaccggcctgtgtaggataggtgggagacgttgaagcgtggtcgccagatcgcgtggagtcatccttgaaataccaccctggtctgtttgcggttctaacctaggtcccttatcgggatcggggaccgtgcatggtgggcagtttgactggggcggtctcctcctaaagtgtaacggaggagttcgaaggtacgctagagacggtcggaaatcgtcttgatagtgcaatggcataagcgtgcttgactgtgagactgacaagtcgaacaggtacgaaagtaggacatagtgatccggtggttctgtatggaagggccatcgctcaacggataaaaggtactctggggataacaggctgataccgcccaagagttcatatcgacggcggtgtttggcacctcgatgtcggctcatctcatcctggggctgtagccggtcccaagggtatggctgttcgccatttaaagaggtacgtgagctgggtttaaaacgtcgtgagacagtttggtccctatctgccgtgggcgttggatatttgacggagcctgctcctagtacgagaggaccggagtggacgtaccactggtgtatcggttgtcatgccaatggcattgccgagtagctacgtacggaagagataaccgctgaaggcatctaagcgggaaactcgtctgaagattagatatcccggaggcttgacctccctgtagggtcgtccgagaccaggacgttgataggctgggtgtggaagtgcagtaatgcatgtagctaaccagtactaattgcccgtgtggcttgatcctataacccttgaggttgtagtgagttaagttgttgaccacagaacgtaatattgaagtgcagcgcaacccgcgctcgacaccttcgtaaccgctgctagctgatccgtactgatcgctagtggtgtgcttcttccaattggctggggcgtcccttaaaaagacgactcggcaaccagttacgcttgacgaccatagcgaggtggtcccacaccttcccatcccgaacaggattgtgaaacgcctttgcgccgatgatagtggacggacgtctgtgaaagtaggtcatcgtcaagctcttattcctcaaaacccccgcaagcgcaccgcttgcgggggttttgttttatgcgtcgccaacgcacaggccagcggcacgccctgatggcatacaagcctgatctcctctgaaattcctactcagtttctcctttgcgccgtagaatacggataaatactttagagctaaaggagttgcccgtgggtgcagagacagtagtagatgcgattgtggttggggcagggcacaatggcttggcagcagcgcgccgggaaatgtgcgcggaacccctatttgtttatttttctaaatacattcaaatatgtatccgctcatgagacaataaccctgataaatgcttcaataatattgaaaaaggaagagtatgagtattcaacatttccgtgtcgcccttattcccttttttgcggcattttgccttcctgtttttgctcacccagaaacgctggtgaaagtaaaagatgctgaagatcagttgggtgcacgagtgggttacatcgaactggatctcaacagcggtaagatccttgagagttttcgccccgaagaacgttttccaatgatgagcacttttaaagttctgctatgtggcgcggtattatcccgtgttgacgccgggcaagagcaactcggtcgccgcatacactattctcagaatgacttggttgagtactcaccagtcacagaaaagcatcttacggatggcatgacagtaagagaattatgcagtgctgcaataaccatgagtgataacactgcggccaacttacttctgacaacgatcggaggaccgaaggagctaaccgcttttttgcacaacatgggggatcatgtaactcgccttgatcgttgggaaccggagctgaatgaagccataccaaacgacgagcgtgacaccacgatgcctgcagcaatggcaacaacgttgcgcaaactattaactggcgaactacttactctagcttcccggcaacaattaatagactggatggaggcggataaagttgcaggaccacttctgcgctcggcccttccggctagctggtttattgctgataaatctggagccggtgagcgtgggtctcgcggtatcattgcagcactggggccagatggtaagccctcccgtatcgtagttatctacacgacggggagtcaggcaactatggatgaacgaaatagacagatcgctgagataggtgcctcactgattaagcattggtaactgcagaccaagtttactcatatatactttagattgatttaaaacttcatttttaatttaaaaggatctaggtgaagatcctttttgataatctcatgaccaaaatcccttaacgtgagttttcgttccactgagcgtcagaccccgtagaaaagatcaaaggatcttcttgagatcctttttttctgcgcgtaatctgctgcttgcaaacaaaaaaaccaccgctaccagcggtggtttgtttgccggatcaagagctaccaactctttttccgaaggtaactggcttcagcagagcgcagataccaaatactgtccttctagtgtagccgtagttaggccaccacttcaagaactctgtagcaccgcctacatacctcgctctgctaatcctgttaccagtggctgctgccagtggcgataagtcgtgtcttaccgggttggactcaagacgatagttaccggataaggcgcagcggtcgggctgaacggggggttcgtgcacacagcccagcttggagcgaacgacctacaccgaactgagatacctacagcgtgagctatgagaaagcgccacgcttcccgaagggagaaaggcggacaggtatccggtaagcggcagggtcggaacaggagagcgcacgagggagcttccagggggaaacgcctggtatctttatagtcctgtcgggtttcgccacctctgacttgagcgtcgatttttgtgatgctcgtcaggggggcggagcctatggaaaaacgccagcaacgcggcctttttacggttcctggccttttgctgg

SEQ ID NO: 82 - DNA, 7606 bp, Artificial
  Synthetic
agacttagggaccctgcggccgccattaattcctaatttttgttgacactctatcattgatagagttattttaccactccctatcagtgatagagaaaagtgaaatgaatagaccggccgctgagaaaaagcgaagcggctgcgagcgcacggtggcggctacggtcgtcatcgaaagcaaagcattatcaagtgctcactgaatgaagtaaggttttttaaacctcacttcctttgagcaagcgatacggatcctggtttcgatcagggtccacacacagagattgaactgaagagtttgatcctggctcagattgaacgctggcgggatgctttacacatgcaagtcggacggcagcacgggcttcggcctggtggcgagtggcgaacgggtgagtaatgtatcggaacgtgcccagtagcgggggataactacgcgaaagcgtggctaataccgcatacgccctacgggggaaagcgggggaccttcgggcctcgcactattggagcggccgatatcggattagctagttggtggggtaacggcctaccaaggcgacgatccgtagctggtttgagaggacgaccagccacactgggactgagacacggcccagactcctacgggaggcagcagtggggaattttggacaatgggggcaaccctgatccagccatcccgcgtgtgcgatgaaggccttcgggttgtaaagcacttttggcaggaaagaaacggcacgggctaatatcctgtgcaactgacggtacctgcagaataagcaccggctaactacgtgccagcagccgcggtaatacgtagggtgcaagcgttaatcggaattactgggcgtaaagcgtgcgcaggcggttcggaaagaaagatgtgaaatcccagggcttaaccttggaactgcatttttaactaccgggctagagtgtgtcagagggaggtggaattccgcgtgtagcagtgaaatgcgtagatatgcggaggaacaccgatggcgaaggcagcctcctgggataacactgacgctcatgcacgaaagtgtggggagcaaacaggattagataccctggtagtccacgccctaaacgatgtcaactagctgttggggccttcgggccttggtagcgcagctaacgcgtgaagttgaccgcctggggagtacggtcgcaagattaaaactcaaaggaattgacggggacccgcacaagcggtggatgatgtggattaattcgatgcaacgcgaaaaaccttacctacccttgacatgtctggaatcccgaagagatttgggagtgctcgcaagagaaccggaacacaggtgctgcatggctgtcgtcagctcgtgtcgtgagatgttgggttaagtcccgcaacgagcgcaacccttgtcattagttgctacgaaagggcactctaatgagactgccggtgacaaaccggaggaaggtggggatgacgtcaagtcctcatggcccttatgggtagggcttcacacgtcatacaatggtcgggacagagggttgccaacccgcgagggggagccaatcccagaaacccggtcgtagtccggatcgcagtctgcaactcgactgcgtgaagtcggaatcgctagtaatcgcggatcagcatgtcgcggtgaatacgttcccgggtcttgtacacaccgcccgtcacaccatgggagtgggttttaccagaagtagttagcctaaccgcaaggggggcgattaccacggtaggattcatgactggggtgaagtcgtaacaaggtagccgtatcggaaggtgcggctggatcacctcctttaagagcttgagtgctcgtgtcaagtgtccacgcttatcggttgttgttatatagctgctggatcggtggctgctgatccgagagagaaaggttttgcgggtctgtagctcagtcggttagagcaccgtcttgataaggcgggggtcgttggttcgaatccaaccagacccaccaaggtttcctgagagggaaatgggggtgtagctcagctgggagagcgcctgctttgcaagcaggatgtcatcggttcgatcccgttcacctccaccaaagcctgtccagaggatgggtgtggggcgagaccagaaggcgagagagcaacgcttagtgctgcgagtcagtgttaagcgttgggttttggcccgacagctatatatgttctttaacaatttggaagaagcacaacgtaaagtgttcgtttagtagtcggcgcgagtcgatgaagacggatacgggttgtgattgcatgattttgttccaagtctcaagaactggctgggcgcgcaagcgtttggtcagatgctttgaacttatgaacggcacaagcgcgaatgaacagcacctataagactttagtgttataggatcaagcgactaagtgcatatggtggatgccttggcgatcacaggcgatgaaggacgtagtagcctgcgaaaagctgcggggagctggcaaacaagcattgatccgcagatatccgaatggggaaacccaccgcgcaagcggtatccctggctgaatacataggccagtggaggcgaaccgggtgaactgaaacatctcagtagctcgaggaaaagaaatcaaccgagattccgaaagtagtggcgagcgaaatcggaagagcctttacgatttagcattttgcatagtcgaacggaatggaaagtccggccgtagcaggtgatagccctgtagacgaaatgcagagtgtggaactaggcgtaagagaagtagggcgggacacgtgaaatcctgtctgaagatggggggaccatcctccaaggctaaatactcgtgatcgaccgatagtgaaccagtaccgtgagggaaaggcgaaaagaaccccggaaggggagtgaaatagatcctgaaaccgtatgcatacaaacagtcggagcctctttatggggtgacggcgtaccttttgtataatgggtcagcgacttacattcagtggcgagcttaaccgaatagggaaggcgtagcgaaagcgagtccgaatagggcgtccagtcgctgggtgtagacccgaaaccagatgatctacccatggccaggttgaaggcacggtaacacgtgctggaggaccgaacccactagtgttgaaaaactaggggatgagctgtggataggggtgaaaggctaaacaaatctggaaatagctggttctctccgaaaactatttaggtagtgcctcaagtattactgcagggggtagagcactgttatggctagggggtcatggcgacttaccaaaccatggcaaactccgaatacctgcaagtacagcttgggagacagagcaccgggtgctaacgtccggactcaagagggaaacaacccagaccgccagctaaggtcccgaattatcgctaagtgggaaacgaagtgggaaggcatagacagtcaggaggttggcttagaagcagccaccctttaaagaaagcgtaatagctcactgatcgagtcgtcctgcgcggaagatgtaacggggctaagcgataaaccgaagctgcgggtgtgcacttttagtgcgcgcggtaggagagcgttctgtaagcctgcgaaggtggcttgtaaaggctgctggaggtatcagaagtgcgaatgctgacatgagtagcgataaagggggtgaaaagccccctcgccgtaagtccaaggtttcctgcgcaacgttcatcggcgcagggtgagtcggcccctaaggcgaggcagagatgcgtagctgatgggaagctggttaatattccagcaccgtcgtacagtgcgatggggggacggatcgcggaaggtcatcagggtgttggacgtccctgttgctgcattgaagatggcgcttaggcaaatccgggcgcgagaatcaagggtgtggcacgagcgagcaagtctcgcgaagtgattggaagtggttccaagaaaagcctctaagcttcagctgtacgagaccgtaccgcaaaccgacacaggtggacgggatgaatattccaaggcgcttgagagaactcaggagaaggaactcggcaaattgataccgtaacttcgggagaaggtataccctggtagtgtgaagcgcctgcgcgctgagcatgaaggggtcgcagagaatcggtggctgcgactgtttattaaaaacacagcactctgcaaagacgaaagtcgacgtatagggtgtgacgcctgcccggtgccggaaggttaagtgatggggtgcaagctcttgatcgaagccccggtaaacggcggccgtaactataacggtcctaaggtagcgaaattccttgtcgggtaagttccgacctgcacgaatggcgtaacgatggccacactgtctcctcctgagactcagcgaagttgaagtgtttgtgatgatgcaatctacccgcggctagacggaaagaccccatgaacctttactgtagctttgcattggactgtgaaccggcctgtgtaggataggtgggaggcgcagaactcgagtcgccagattcgagggagccatccttgaaataccaccctggtttgtttgcggttctaaccttggtccgttatccggatcggggacagtgcatggtaggcagtttgactggggcggtctcctcccaaagcgtaacggaggagttcgaaggtacgctaggtacggtcggaaatcgtgctgatagtgcaatggcataagcgtgcttgactgtgagactgacaagtcgaacaggtgcgaaagcaggacatagtgatccggtggttctgaatggaagggccatcgctcaacggataaaaggtactctggggataacaggctgataccgcccaagagttcatatcgacggcggtgtttggcacctcgatgtcggctcatctcatcctggggctgtagccggtcccaagggtatggctgttcgccatttaaagaggtacgtgagctgggtttaaaacgtcgtgagacagtttggtccctatctgccgtgggcgttggatacttgacggagcctgctcctagtacgagaggaccggagtggacgtacctctggtgtaccggttgtcatgccaatggcattgccgggtagctaagtacggaagagataaccgctgaaggcatctaagcgggaaactcgtctgaagattaggtatcccggggactagatccccctgaagggtcgttcgagaccaggacgttgataggtcgggtgtggaagcgcagtaatgcgttaagctaaccgatactaattgcccgtgaggcttgatcctataactctcaagtcttaattattaccgctggacagtaagcgccagcgccgttcataccaacacaacatacacacgcaacccgcgtcgctgccagtcccaaccgactgccaggcgcacgctgtgcttcttccaaattcaagccgttgaccctgcgtcaaccgcttagccggttacgcctgacgaccatagcaaggtggtcccactccttcccatcccgaacaggacagtgaaacgccttcgcgccgatgatagtggatgtacatctgtgaaagtaggtcatcgtcaggcttttattgctcaaaaccccgcagcctcacggctcgcggggttttgtttttgggggtacgcccaggcggctggccccgcaacgggcacgacagccgcggccggggggcctgtccctgcggggggaaggatacctgcggcccgggtgcctgtccccgcagggggacaggcacctgcagacatccccatcttctgacgaaccgcctgcagcgtgtgtcagtccccctgcggggacagacacacgctgtggaagcgcgccgggaaatgtgcgcggaacccctatttgtttatttttctaaatacattcaaatatgtatccgctcatgagacaataaccctgataaatgcttcaataatattgaaaaaggaagagtatgagtattcaacatttccgtgtcgcccttattcccttttttgcggcattttgccttcctgtttttgctcacccagaaacgctggtgaaagtaaaagatgctgaagatcagttgggtgcacgagtgggttacatcgaactggatctcaacagcggtaagatccttgagagttttcgccccgaagaacgttttccaatgatgagcacttttaaagttctgctatgtggcgcggtattatcccgtgttgacgccgggcaagagcaactcggtcgccgcatacactattctcagaatgacttggttgagtactcaccagtcacagaaaagcatcttacggatggcatgacagtaagagaattatgcagtgctgcaataaccatgagtgataacactgcggccaacttacttctgacaacgatcggaggaccgaaggagctaaccgcttttttgcacaacatgggggatcatgtaactcgccttgatcgttgggaaccggagctgaatgaagccataccaaacgacgagcgtgacaccacgatgcctgcagcaatggcaacaacgttgcgcaaactattaactggcgaactacttactctagcttcccggcaacaattaatagactggatggaggcggataaagttgcaggaccacttctgcgctcggcccttccggctagctggtttattgctgataaatctggagccggtgagcgtgggtctcgcggtatcattgcagcactggggccagatggtaagccctcccgtatcgtagttatctacacgacggggagtcaggcaactatggatgaacgaaatagacagatcgctgagataggtgcctcactgattaagcattggtaactgcagaccaagtttactcatatatactttagattgatttaaaacttcatttttaatttaaaaggatctaggtgaagatcctttttgataatctcatgaccaaaatcccttaacgtgagttttcgttccactgagcgtcagaccccgtagaaaagatcaaaggatcttcttgagatcctttttttctgcgcgtaatctgctgcttgcaaacaaaaaaaccaccgctaccagcggtggtttgtttgccggatcaagagctaccaactctttttccgaaggtaactggcttcagcagagcgcagataccaaatactgtccttctagtgtagccgtagttaggccaccacttcaagaactctgtagcaccgcctacatacctcgctctgctaatcctgttaccagtggctgctgccagtggcgataagtcgtgtcttaccgggttggactcaagacgatagttaccggataaggcgcagcggtcgggctgaacggggggttcgtgcacacagcccagcttggagcgaacgacctacaccgaactgagatacctacagcgtgagctatgagaaagcgccacgcttcccgaagggagaaaggcggacaggtatccggtaagcggcagggtcggaacaggagagcgcacgagggagcttccagggggaaacgcctggtatctttatagtcctgtcgggtttcgccacctctgacttgagcgtcgatttttgtgatgctcgtcaggggggcggagcctatggaaaaacgccagcaacgcggcctttttacggttcctggccttttgctgg

SEQ ID NO: 83 - DNA, 7383 bp, Artificial
  Synthetic
agacttagggaccctgcggccgccattaattcctaatttttgttgacactctatcattgatagagttattttaccactccctatcagtgatagagaaaagtgaaatgaatagaccggccgctgagaaaaagcgaagcggcactgctctttaacaatttatcagacaatctgtgtgggcactcgaagatacggattcttaacgtcgcaagacgaaaaatgaataccaagtctcaagagtgaacacgtaattcattacgaagtttaattctttgagcgtcaaacttttgaactgaagagtttgatcctggctcagattgaacgctggcgggatgctttacacatgcaagtcggacggcagcacgggcttcggcctggtggcgagtggcgaacgggtgagtaatgtatcggaacgtgcccagtagcgggggataactacgcgaaagcgtggctaataccgcatacgccctacgggggaaagcgggggaccttcgggcctcgcactattggagcggccgatatcggattagctagttggtggggtaacggcctaccaaggcgacgatccgtagctggtttgagaggacgaccagccacactgggactgagacacggcccagactcctacgggaggcagcagtggggaattttggacaatgggggcaaccctgatccagccatcccgcgtgtgcgatgaaggccttcgggttgtaaagcacttttggcaggaaagaaacggcacgggctaatatcctgtgcaactgacggtacctgcagaataagcaccggctaactacgtgccagcagccgcggtaatacgtagggtgcaagcgttaatcggaattactgggcgtaaagcgtgcgcaggcggttcggaaagaaagatgtgaaatcccagggcttaaccttggaactgcatttttaactaccgggctagagtgtgtcagagggaggtggaattccgcgtgtagcagtgaaatgcgtagatatgcggaggaacaccgatggcgaaggcagcctcctgggataacactgacgctcatgcacgaaagtgtggggagcaaacaggattagataccctggtagtccacgccctaaacgatgtcaactagctgttggggccttcgggccttggtagcgcagctaacgcgtgaagttgaccgcctggggagtacggtcgcaagattaaaactcaaaggaattgacggggacccgcacaagcggtggatgatgtggattaattcgatgcaacgcgaaaaaccttacctacccttgacatgtctggaatcccgaagagatttgggagtgctcgcaagagaaccggaacacaggtgctgcatggctgtcgtcagctcgtgtcgtgagatgttgggttaagtcccgcaacgagcgcaacccttgtcattagttgctacgaaagggcactctaatgagactgccggtgacaaaccggaggaaggtggggatgacgtcaagtcctcatggcccttatgggtagggcttcacacgtcatacaatggtcgggacagagggttgccaacccgcgagggggagccaatcccagaaacccggtcgtagtccggatcgcagtctgcaactcgactgcgtgaagtcggaatcgctagtaatcgcggatcagcatgtcgcggtgaatacgttcccgggtcttgtacacaccgcccgtcacaccatgggagtgggttttaccagaagtagttagcctaaccgcaaggggggcgattaccacggtaggattcatgactggggtgaagtcgtaacaaggtagccgtatcggaaggtgcggctggatcacctcctttccttaaagaagcgtactttgtagtgctcacacagattgtctgatagaaagtgaaaagcaaggcgtttacgcgttgggagtgaggctgaagagaataaggccgttcgctttctattaatgaaagctcaccctacacgaaaatatcacgcaacgcgtgataagcaattttcgtgtccccttcgtctagaggcccaggacaccgccctttcacggcggtaacaggggttcgaatcccctaggggacgccacttgctggtttgtgagtgaaagtcgccgaccttaatatctcaaaactcatcttcgggtgatgtttgagatatttgctctttaaaaatctggatcaagctgaaaattgaaacactgaacaacgagagttgttcgtgagtctctcaaattttcgcaacacgatgatgaatcgaaagaaacatcttcgggttgtgagatcaagcgactaagtgcatatggtggatgccttggcgatcacaggcgatgaaggacgtagtagcctgcgaaaagctgcggggagctggcaaacaagcattgatccgcagatatccgaatggggaaacccaccgcgcaagcggtatccctggctgaatacataggccagtggaggcgaaccgggtgaactgaaacatctcagtagctcgaggaaaagaaatcaaccgagattccgaaagtagtggcgagcgaaatcggaagagcctttacgatttagcattttgcatagtcgaacggaatggaaagtccggccgtagcaggtgatagccctgtagacgaaatgcagagtgtggaactaggcgtaagagaagtagggcgggacacgtgaaatcctgtctgaagatggggggaccatcctccaaggctaaatactcgtgatcgaccgatagtgaaccagtaccgtgagggaaaggcgaaaagaaccccggaaggggagtgaaatagatcctgaaaccgtatgcatacaaacagtcggagcctctttatggggtgacggcgtaccttttgtataatgggtcagcgacttacattcagtggcgagcttaaccgaatagggaaggcgtagcgaaagcgagtccgaatagggcgtccagtcgctgggtgtagacccgaaaccagatgatctacccatggccaggttgaaggcacggtaacacgtgctggaggaccgaacccactagtgttgaaaaactaggggatgagctgtggataggggtgaaaggctaaacaaatctggaaatagctggttctctccgaaaactatttaggtagtgcctcaagtattactgcagggggtagagcactgttatggctagggggtcatggcgacttaccaaaccatggcaaactccgaatacctgcaagtacagcttgggagacagagcaccgggtgctaacgtccggactcaagagggaaacaacccagaccgccagctaaggtcccgaattatcgctaagtgggaaacgaagtgggaaggcatagacagtcaggaggttggcttagaagcagccaccctttaaagaaagcgtaatagctcactgatcgagtcgtcctgcgcggaagatgtaacggggctaagcgataaaccgaagctgcgggtgtgcacttttagtgcgcgcggtaggagagcgttctgtaagcctgcgaaggtggcttgtaaaggctgctggaggtatcagaagtgcgaatgctgacatgagtagcgataaagggggtgaaaagccccctcgccgtaagtccaaggtttcctgcgcaacgttcatcggcgcagggtgagtcggcccctaaggcgaggcagagatgcgtagctgatgggaagctggttaatattccagcaccgtcgtacagtgcgatggggggacggatcgcggaaggtcatcagggtgttggacgtccctgttgctgcattgaagatggcgcttaggcaaatccgggcgcgagaatcaagggtgtggcacgagcgagcaagtctcgcgaagtgattggaagtggttccaagaaaagcctctaagcttcagctgtacgagaccgtaccgcaaaccgacacaggtggacgggatgaatattccaaggcgcttgagagaactcaggagaaggaactcggcaaattgataccgtaacttcgggagaaggtataccctggtagtgtgaagcgcctgcgcgctgagcatgaaggggtcgcagagaatcggtggctgcgactgtttattaaaaacacagcactctgcaaagacgaaagtcgacgtatagggtgtgacgcctgcccggtgccggaaggttaagtgatggggtgcaagctcttgatcgaagccccggtaaacggcggccgtaactataacggtcctaaggtagcgaaattccttgtcgggtaagttccgacctgcacgaatggcgtaacgatggccacactgtctcctcctgagactcagcgaagttgaagtgtttgtgatgatgcaatctacccgcggctagacggaaagaccccatgaacctttactgtagctttgcattggactgtgaaccggcctgtgtaggataggtgggaggcgcagaactcgagtcgccagattcgagggagccatccttgaaataccaccctggtttgtttgcggttctaaccttggtccgttatccggatcggggacagtgcatggtaggcagtttgactggggcggtctcctcccaaagcgtaacggaggagttcgaaggtacgctaggtacggtcggaaatcgtgctgatagtgcaatggcataagcgtgcttgactgtgagactgacaagtcgaacaggtgcgaaagcaggacatagtgatccggtggttctgaatggaagggccatcgctcaacggataaaaggtactctggggataacaggctgataccgcccaagagttcatatcgacggcggtgtttggcacctcgatgtcggctcatctcatcctggggctgtagccggtcccaagggtatggctgttcgccatttaaagaggtacgtgagctgggtttaaaacgtcgtgagacagtttggtccctatctgccgtgggcgttggatacttgacggagcctgctcctagtacgagaggaccggagtggacgtacctctggtgtaccggttgtcatgccaatggcattgccgggtagctaagtacggaagagataaccgctgaaggcatctaagcgggaaactcgtctgaagattaggtatcccggggactagatccccctgaagggtcgttcgagaccaggacgttgataggtcgggtgtggaagcgcagtaatgcgttaagctaaccgatactaattgcccgtgaggcttgatcctacaacgccgaagctgttttggcggatgagagaagattttcagcctgatacagattaaatcagaacgcagaagcggtctgataaaacagaatttcgcctgacgaccatagcaaggtggtcccactccttcccatcccgaacaggacagtgaaacgccttcgcgccgatgatagtggatgtacatctgtgaaagtaggtcatcgtcaggcttcaaataaaacgaaaggctcagtcgaaagactgggcctttcgttttatctgttgtttgtcggtgaacgctctcctgagtaggacaaatccgccgggagcggatttgaacgttgcgaagcaacggcccggagggtggcgggcaggacgcccgccataaactgccaggcatcaaattaagcagaaggccatcctgacggatggcctttttgcgtttctacaaactcttcctgtcgtcatatctacaagccggcgcgccgggaaatgtgcgcggaacccctatttgtttatttttctaaatacattcaaatatgtatccgctcatgagacaataaccctgataaatgcttcaataatattgaaaaaggaagagtatgagtattcaacatttccgtgtcgcccttattcccttttttgcggcattttgccttcctgtttttgctcacccagaaacgctggtgaaagtaaaagatgctgaagatcagttgggtgcacgagtgggttacatcgaactggatctcaacagcggtaagatccttgagagttttcgccccgaagaacgttttccaatgatgagcacttttaaagttctgctatgtggcgcggtattatcccgtgttgacgccgggcaagagcaactcggtcgccgcatacactattctcagaatgacttggttgagtactcaccagtcacagaaaagcatcttacggatggcatgacagtaagagaattatgcagtgctgcaataaccatgagtgataacactgcggccaacttacttctgacaacgatcggaggaccgaaggagctaaccgcttttttgcacaacatgggggatcatgtaactcgccttgatcgttgggaaccggagctgaatgaagccataccaaacgacgagcgtgacaccacgatgcctgcagcaatggcaacaacgttgcgcaaactattaactggcgaactacttactctagcttcccggcaacaattaatagactggatggaggcggataaagttgcaggaccacttctgcgctcggcccttccggctagctggtttattgctgataaatctggagccggtgagcgtgggtctcgcggtatcattgcagcactggggccagatggtaagccctcccgtatcgtagttatctacacgacggggagtcaggcaactatggatgaacgaaatagacagatcgctgagataggtgcctcactgattaagcattggtaactgcagaccaagtttactcatatatactttagattgatttaaaacttcatttttaatttaaaaggatctaggtgaagatcctttttgataatctcatgaccaaaatcccttaacgtgagttttcgttccactgagcgtcagaccccgtagaaaagatcaaaggatcttcttgagatcctttttttctgcgcgtaatctgctgcttgcaaacaaaaaaaccaccgctaccagcggtggtttgtttgccggatcaagagctaccaactctttttccgaaggtaactggcttcagcagagcgcagataccaaatactgtccttctagtgtagccgtagttaggccaccacttcaagaactctgtagcaccgcctacatacctcgctctgctaatcctgttaccagtggctgctgccagtggcgataagtcgtgtcttaccgggttggactcaagacgatagttaccggataaggcgcagcggtcgggctgaacggggggttcgtgcacacagcccagcttggagcgaacgacctacaccgaactgagatacctacagcgtgagctatgagaaagcgccacgcttcccgaagggagaaaggcggacaggtatccggtaagcggcagggtcggaacaggagagcgcacgagggagcttccagggggaaacgcctggtatctttatagtcctgtcgggtttcgccacctctgacttgagcgtcgatttttgtgatgctcgtcaggggggcggagcctatggaaaaacgccagcaacgcggcctttttacggttcctggccttttgctgg

SEQ ID NO: 84 - DNA, 7606 bp, Artificial
  Synthetic
agacttagggaccctgcggccgccattaattcctaatttttgttgacactctatcattgatagagttattttaccactccctatcagtgatagagaaaagtgaaatgaatagaccggccgctgagaaaaagcgaagcggctgcgagcgcacggtggcggctacggtcgtcatcgaaagcaaagcattatcaagtgctcactgaatgaagtaaggttttttaaacctcacttcctttgagcaagcgatacggatcctggtttcgatcagggtccacacacagagattgaactgaagagtttgatcctggctcagattgaacgctggcgggatgctttacacatgcaagtcggacggcagcacgggcttcggcctggtggcgagtggcgaacgggtgagtaatgtatcggaacgtgcccagtagcgggggataactacgcgaaagcgtggctaataccgcatacgccctacgggggaaagcgggggaccttcgggcctcgcactattggagcggccgatatcggattagctagttggtggggtaacggcctaccaaggcgacgatccgtagctggtttgagaggacgaccagccacactgggactgagacacggcccagactcctacgggaggcagcagtggggaattttggacaatgggggcaaccctgatccagccatcccgcgtgtgcgatgaaggccttcgggttgtaaagcacttttggcaggaaagaaacggcacgggctaatatcctgtgcaactgacggtacctgcagaataagcaccggctaactacgtgccagcagccgcggtaatacgtagggtgcaagcgttaatcggaattactgggcgtaaagcgtgcgcaggcggttcggaaagaaagatgtgaaatcccagggcttaaccttggaactgcatttttaactaccgggctagagtgtgtcagagggaggtggaattccgcgtgtagcagtgaaatgcgtagatatgcggaggaacaccgatggcgaaggcagcctcctgggataacactgacgctcatgcacgaaagtgtggggagcaaacaggattagataccctggtagtccacgccctaaacgatgtcaactagctgttggggccttcgggccttggtagcgcagctaacgcgtgaagttgaccgcctggggagtacggtcgcaagattaaaactcaaaggaattgacgggaacccgcacaagcggtggatgatgtggattaattcgatgcaacgcgaaaaaccttacctacccttgacatgtctggaatcccgaagagatttgggagtgctcgcaagagaaccggaacacaggtgctgcatggctgtcgtcagctcgtgtcgtgagatgttgggttaagtcccgcaacgagcgcaacccttgtcattagttgctacgaaagggcactctaatgagactgccggtgacaaaccggaggaaggtggggatgacgtcaagtcctcatggcccttatgggtagggcttcacacgtcatacaatggtcgggacagagggttgccaacccgcgagggggagccaatcccagaaacccggtcgtagtccggatcgcagtctgcaactcgactgcgtgaagtcggaatcgctagtaatcgcggatcagcatgtcgcggtgaatacgttcccgggtcttgtacacaccgcccgtcacaccatgggagtgggttttaccagaagtagttagcctaaccgcaaggggggcgattaccacggtaggattcatgactggggtgaagtcgtaacaaggtagccgtatcggaaggtgcggctggatcatgtggtttaagagcttgagtgctcgtgtcaagtgtccacgcttatcggttgttgttatatagctgctggatcggtggctgctgatccgagagagaaaggttttgcgggtctgtagctcagtcggttagagcaccgtcttgataaggcgggggtcgttggttcgaatccaaccagacccaccaaggtttcctgagagggaaatgggggtgtagctcagctgggagagcgcctgctttgcaagcaggatgtcatcggttcgatcccgttcacctccaccaaagcctgtccagaggatgggtgtggggcgagaccagaaggcgagagagcaacgcttagtgctgcgagtcagtgttaagcgttgggttttggcccgacagctatatatgttctttaacaatttggaagaagcacaacgtaaagtgttcgtttagtagtcggcgcgagtcgatgaagacggatacgggttgtgattgcatgattttgttccaagtctcaagaactggctgggcgcgcaagcgtttggtcagatgctttgaacttatgaacggcacaagcgcgaatgaacagcacctataagactttagtgttataggatcaagcgactaagtgcatatggtggatgccttggcgatcacaggcgatgaaggacgtagtagcctgcgaaaagctgcggggagctggcaaacaagcattgatccgcagatatccgaatggggaaacccaccgcgcaagcggtatccctggctgaatacataggccagtggaggcgaaccgggtgaactgaaacatctcagtagctcgaggaaaagaaatcaaccgagattccgaaagtagtggcgagcgaaatcggaagagcctttacgatttagcattttgcatagtcgaacggaatggaaagtccggccgtagcaggtgatagccctgtagacgaaatgcagagtgtggaactaggcgtaagagaagtagggcgggacacgtgaaatcctgtctgaagatggggggaccatcctccaaggctaaatactcgtgatcgaccgatagtgaaccagtaccgtgagggaaaggcgaaaagaaccccggaaggggagtgaaatagatcctgaaaccgtatgcatacaaacagtcggagcctctttatggggtgacggcgtaccttttgtataatgggtcagcgacttacattcagtggcgagcttaaccgaatagggaaggcgtagcgaaagcgagtccgaatagggcgtccagtcgctgggtgtagacccgaaaccagatgatctacccatggccaggttgaaggcacggtaacacgtgctggaggaccgaacccactagtgttgaaaaactaggggatgagctgtggataggggtgaaaggctaaacaaatctggaaatagctggttctctccgaaaactatttaggtagtgcctcaagtattactgcagggggtagagcactgttatggctagggggtcatggcgacttaccaaaccatggcaaactccgaatacctgcaagtacagcttgggagacagagcaccgggtgctaacgtccggactcaagagggaaacaacccagaccgccagctaaggtcccgaattatcgctaagtgggaaacgaagtgggaaggcatagacagtcaggaggttggcttagaagcagccaccctttaaagaaagcgtaatagctcactgatcgagtcgtcctgcgcggaagatgtaacggggctaagcgataaaccgaagctgcgggtgtgcacttttagtgcgcgcggtaggagagcgttctgtaagcctgcgaaggtggcttgtaaaggctgctggaggtatcagaagtgcgaatgctgacatgagtagcgataaagggggtgaaaagccccctcgccgtaagtccaaggtttcctgcgcaacgttcatcggcgcagggtgagtcggcccctaaggcgaggcagagatgcgtagctgatgggaagctggttaatattccagcaccgtcgtacagtgcgatggggggacggatcgcggaaggtcatcagggtgttggacgtccctgttgctgcattgaagatggcgcttaggcaaatccgggcgcgagaatcaagggtgtggcacgagcgagcaagtctcgcgaagtgattggaagtggttccaagaaaagcctctaagcttcagctgtacgagaccgtaccgcaaaccgacacaggtggacgggatgaatattccaaggcgcttgagagaactcaggagaaggaactcggcaaattgataccgtaacttcgggagaaggtataccctggtagtgtgaagcgcctgcgcgctgagcatgaaggggtcgcagagaatcggtggctgcgactgtttattaaaaacacagcactctgcaaagacgaaagtcgacgtatagggtgtgacgcctgcccggtgccggaaggttaagtgatggggtgcaagctcttgatcgaagccccggtaaacggcggccgtaactataacggtcctaaggtagcgaaattccttgtcgggtaagttccgacctgcacgaatggcgtaacgatggccacactgtctcctcctgagactcagcgaagttgaagtgtttgtgatgatgcaatctacccgcggctagacggaaagaccccatgaacctttactgtagctttgcattggactgtgaaccggcctgtgtaggataggtgggaggcgcagaactcgagtcgccagattcgagggagccatccttgaaataccaccctggtttgtttgcggttctaaccttggtccgttatccggatcggggacagtgcatggtaggcagtttgactggggcggtctcctcccaaagcgtaacggaggagttcgaaggtacgctaggtacggtcggaaatcgtgctgatagtgcaatggcataagcgtgcttgactgtgagactgacaagtcgaacaggtgcgaaagcaggacatagtgatccggtggttctgaatggaagggccatcgctcaacggataaaaggtactctggggataacaggctgataccgcccaagagttcatatcgacggcggtgtttggcacctcgatgtcggctcatctcatcctggggctgtagccggtcccaagggtatggctgttcgccatttaaagaggtacgtgagctgggtttaaaacgtcgtgagacagtttggtccctatctgccgtgggcgttggatacttgacggagcctgctcctagtacgagaggaccggagtggacgtacctctggtgtaccggttgtcatgccaatggcattgccgggtagctaagtacggaagagataaccgctgaaggcatctaagcgggaaactcgtctgaagattaggtatcccggggactagatccccctgaagggtcgttcgagaccaggacgttgataggtcgggtgtggaagcgcagtaatgcgttaagctaaccgatactaattgcccgtgaggcttgatcctataactctcaagtcttaattattaccgctggacagtaagcgccagcgccgttcataccaacacaacatacacacgcaacccgcgtcgctgccagtcccaaccgactgccaggcgcacgctgtgcttcttccaaattcaagccgttgaccctgcgtcaaccgcttagccggttacgcctgacgaccatagcaaggtggtcccactccttcccatcccgaacaggacagtgaaacgccttcgcgccgatgatagtggatgtacatctgtgaaagtaggtcatcgtcaggcttttattgctcaaaaccccgcagcctcacggctcgcggggttttgtttttgggggtacgcccaggcggctggccccgcaacgggcacgacagccgcggccggggggcctgtccctgcggggggaaggatacctgcggcccgggtgcctgtccccgcagggggacaggcacctgcagacatccccatcttctgacgaaccgcctgcagcgtgtgtcagtccccctgcggggacagacacacgctgtggaagcgcgccgggaaatgtgcgcggaacccctatttgtttatttttctaaatacattcaaatatgtatccgctcatgagacaataaccctgataaatgcttcaataatattgaaaaaggaagagtatgagtattcaacatttccgtgtcgcccttattcccttttttgcggcattttgccttcctgtttttgctcacccagaaacgctggtgaaagtaaaagatgctgaagatcagttgggtgcacgagtgggttacatcgaactggatctcaacagcggtaagatccttgagagttttcgccccgaagaacgttttccaatgatgagcacttttaaagttctgctatgtggcgcggtattatcccgtgttgacgccgggcaagagcaactcggtcgccgcatacactattctcagaatgacttggttgagtactcaccagtcacagaaaagcatcttacggatggcatgacagtaagagaattatgcagtgctgcaataaccatgagtgataacactgcggccaacttacttctgacaacgatcggaggaccgaaggagctaaccgcttttttgcacaacatgggggatcatgtaactcgccttgatcgttgggaaccggagctgaatgaagccataccaaacgacgagcgtgacaccacgatgcctgcagcaatggcaacaacgttgcgcaaactattaactggcgaactacttactctagcttcccggcaacaattaatagactggatggaggcggataaagttgcaggaccacttctgcgctcggcccttccggctagctggtttattgctgataaatctggagccggtgagcgtgggtctcgcggtatcattgcagcactggggccagatggtaagccctcccgtatcgtagttatctacacgacggggagtcaggcaactatggatgaacgaaatagacagatcgctgagataggtgcctcactgattaagcattggtaactgcagaccaagtttactcatatatactttagattgatttaaaacttcatttttaatttaaaaggatctaggtgaagatcctttttgataatctcatgaccaaaatcccttaacgtgagttttcgttccactgagcgtcagaccccgtagaaaagatcaaaggatcttcttgagatcctttttttctgcgcgtaatctgctgcttgcaaacaaaaaaaccaccgctaccagcggtggtttgtttgccggatcaagagctaccaactctttttccgaaggtaactggcttcagcagagcgcagataccaaatactgtccttctagtgtagccgtagttaggccaccacttcaagaactctgtagcaccgcctacatacctcgctctgctaatcctgttaccagtggctgctgccagtggcgataagtcgtgtcttaccgggttggactcaagacgatagttaccggataaggcgcagcggtcgggctgaacggggggttcgtgcacacagcccagcttggagcgaacgacctacaccgaactgagatacctacagcgtgagctatgagaaagcgccacgcttcccgaagggagaaaggcggacaggtatccggtaagcggcagggtcggaacaggagagcgcacgagggagcttccagggggaaacgcctggtatctttatagtcctgtcgggtttcgccacctctgacttgagcgtcgatttttgtgatgctcgtcaggggggcggagcctatggaaaaacgccagcaacgcggcctttttacggttcctggccttttgctgg

SEQ ID NO: 85 - DNA, 7530 bp, Artificial
  Synthetic
agacttagggaccctgcggccgccattaattcctaatttttgttgacactctatcattgatagagttattttaccactccctatcagtgatagagaaaagtgaaatgaatagaccggccgctgagaaaaagcgaagcggcatgaaagcgagctgatcctcggatcagatagcgaaagtatcaagagtctcacactaaagtaagtcaggtttatgaagtgattcatattcctgtcagctttgagtgagcgaccggttcttaaccgaaccgaaaacagtaacaggtttgaactgaagagtttgatcctggctcagattgaacgctggcggcatgccttacacatgcaagtcgaacggcagcacgggtgcttgcacctggtggcgagtggcgaacgggtgagtaatacatcggaacatgtcctgtagtgggggatagcccggcgaaagccggattaataccgcatacgatccatggatgaaagcgggggaccttcgggcctcgcgctatagggttggccgatggctgattagctagttggtggggtaaaggcctaccaaggcgacgatcagtagctggtctgagaggacgaccagccacactgggactgagacacggcccagactcctacgggaggcagcagtggggaattttggacaatgggcgaaagcctgatccagcaatgccgcgtgtgtgaagaaggccttcgggttgtaaagcacttttgtccggaaagaaatccttggctctaatacagtcgggggatgacggtaccggaagaataagcaccggctaactacgtgccagcagccgcggtaatacgtagggtgcgagcgttaatcggaattactgggcgtaaagcgtgcgcaggcggtttgctaagaccgatgtgaaatccccgggctcaacctgggaactgcattggtgactggcaggctagagtatggcagaggggggtagaattccacgtgtagcagtgaaatgcgtagagatgtggaggaataccgatggcgaaggcagccccctgggccaatactgacgctcatgcacgaaagcgtggggagcaaacaggattagataccctggtagtccacgccctaaacgatgtcaactagttgttggggattcatttccttagtaacgtagctaacgcgtgaagttgaccgcctggggagtacggtcgcaagattaaaactcaaaggaattgacggggacccgcacaagcggtggatgatgtggattaattcgatgcaacgcgaaaaaccttacctacccttgacatggtcggaatcctgctgagaggtgggagtgctcgaaagagaaccggcgcacaggtgctgcatggctgtcgtcagctcgtgtcgtgagatgttgggttaagtcccgcaacgagcgcaacccttgtccttagttgctacgcaagagcactctaaggagactgccggtgacaaaccggaggaaggtggggatgacgtcaagtcctcatggcccttatgggtagggcttcacacgtcatacaatggtcggaacagagggttgccaacccgcgagggggagctaatcccagaaaaccgatcgtagtccggattgcactctgcaactcgagtgcatgaagctggaatcgctagtaatcgcggatcagcatgccgcggtgaatacgttcccgggtcttgtacacaccgcccgtcacaccatgggagtgggttttaccagaagtggctagtctaaccgcaaggaggacggtcaccacggtaggattcatgactggggtgaagtcgtaacaaggtagccgtatcggaaggtgcggctggatcacctcctttccagagctatctcgcgaagttgagcgctcacgcttatcggctgtaaattaaagacagactcaggggtctgtagctcagtcggttagagcaccgtcttgataaggcgggggtcgttggttcgaatccaaccagacccaccaccgtcttgtgtggcggtacacacctgaggaattctgtacatgggggcatagctcagctgggagagcacctgctttgcaagcagggggtcgtcggttcgatcccgtctgcctccaccaatcctcaatgacaaacattcgaatgatgattgttcgagtctttgtcattggcgattgagccagtcagagcggtacgaaagtatcggctgtcgttctttaacaatctggaagaagtaagtaatttggatagcggaagcgtctcgagatggacgtggaagttatccgggttgtgattgtatcgatgtatctcaagatgattcgaactttaagtttgactcaattggaatacggcacaacgcgagaactcaacctgtaacgagacagactcgttatagggtcaagcgaacaagtgcatgtggtggatgccttggcgatcacaggcgatgaaggacgcggtagcctgcgaaaagctacggggagctggcaaacgagctttgatccgtagatgtccgaatggggaaacccactccttttggagtatccatggctgaatacataggccatgcgaagcgaacgcggtgaactgaaacatctaagtaaccgcaggaaaagaaatcaaccgagattcccaaagtagtggcgagcgaaatgggatgagccttgcactctttatttgtattgttagccgaacgctctggaaagtgcggccatagcaggtgatagccctgtaggcgaaaacagtatgaaagaactaggtgtgcgacaagtagggcgggacacgtgaaatcctgtctgaagatggggggaccatcctccaaggctaaatactcgtgatcgaccgatagtgaaccagtaccgtgagggaaaggcgaaaagaaccccgggaggggagtgaaatagatcctgaaaccgcatgcatacaaacagtcggagcctcgtaaggggtgacggcgtaccttttgtataatgggtcagcgacttacgttcagtagcaagcttaaccgtatagggcaggcgtagcgaaagcgagtccgaatagggcgttcagttgctgggcgtagacccgaaaccaggtgatctatccatggccaggatgaaggtgcggtaacacgtactggaggtccgaacccactaacgttgaaaagttaggggatgagctgtggataggggtgaaaggctaaacaaacctggaaatagctggttctctccgaaaactatttaggtagtgcctcgtgtctcaccttcgggggtagagcactgtcatggttggggggtctattgcagattaccccgccatagcaaactccgaataccgaagagtgcaatcacgggagacagacatcgggtgctaacgtccggtgtcaagagggaaacaacccagaccgccagctaaggtccccaaatatagctaagtgggaaacgaagtgggaaggctaaaacagtcaggaggttggcttagaagcagccaccctttaaagaaagcgtaatagctcactgatcgagtcgtcctgcgcggaagatgtaacggggctaagctatataccgaagctgcggatgcgagcttgctcgcatggtaggagagcgttccgtaagcctgcgaaggtgccttgtaaagggtgctggaggtatcggaagtgcgaatgctgacatgagtagcgataaagggggtgaaaggccccctcgccgtaagcccaaggtttcctacgcaacgttcatcggcgtagggtgagtcggcccctaaggcgaggcagaaatgcgtagctgatgggaagcaggtcaatattcctgcaccattgttagatgcgatggggggacggatcgcggaaggttgtccgggtgttggaagtcccggtcgctgcattggagaaggcgcttaggcaaatccgggcgcgtaattcaagggtgtggcgcgagctccttagggagcgaagcaattggaagtggttccaagaaaagcctctaagcttcagtctaacgatgaccgtaccgcaaaccgacacaggtgggcgagatgagtattctaaggcgcttgagagaactcgggagaaggaactcggcaaattggtaccgtaacttcgggataaggtacgcccttgtagcttgactggcctgcgccaggagggtgaaggggttgcaataaactggtggctgcgactgtttaataaaaacacagcactctgcaaacacgaaagtggacgtatagggtgtgacgcctgcccggtgccggaagattaaatgatggggtgcaagctcttgattgaagtcccggtaaacggcggccgtaactataacggtcctaaggtagcgaaattccttgtcgggtaagttccgacctgcacgaatggcgtaacgatggccacactgtctcctcccgagactcagcgaagttgaagtgtttgtgatgatgcaatctacccgcggctagacggaaagaccccatgaacctttactgtagctttgcattggactttgaaccgatctgtgtaggataggtgggaggctatgaagccggaacgctagtttcggtggagccgtccttgaaataccaccctggtttgtttgaggttctaaccttggcccgtgatccgggtcggggacagtgcatggtaggcagtttgactggggcggtctcctcccaaagcgtaacggaggagtacgaaggtacgctaggtacggtcggaaatcgtgctgatagtgcaatggcataagcgtgcttaactgcgagaccgacaagtcgagcaggtgcgaaagcaggtcatagtgatccggtggttctgtatggaagggccatcgctcaacggataaaaggtactctggggataacaggctgataccgcccaagagttcatatcgacggcggtgtttggcacctcgatgtcggctcatctcatcctggggctgtagccggtcccaagggtatggctgttcgccatttaaagaggtacgtgagctgggtttaaaacgtcgtgagacagtttggtccctatctgccgtgggcgttggatatttgaagggggctgctcctagtacgagaggaccggagtggacgaacctctggtgtaccggttgtcacgccagtggcatcgccgggtagctatgttcggaagagataaccgctgaaagcatctaagcgggaaactcgccttaagatgagatatccctggggactagatccccttgaagggtcgttcgagaccaggacgttgataggtcaggtgtgtaagcgcagtaatgcgttcagctaactgatactaattgcccgtaaggcttgatcctataacaagtctgccttgtagatcggcgccgtgtgaaagcactggccgcgatccagagcgacatgttggattctcgtgtgtgatacacacaacctaattactgcttcttccaagattggttgcgctgcgaagcaacgcaacaaccccctttgcctgatgaccatagcgagtcggtcccaccccttcccatcccgaacaggaccgtgaaacgactctacgccgatgatagtgcggattcccgtgtgaaagtaggtaatcgtcaggctccctaagccaggaacccccgcccgaaaggcgggggtttttgcatttcagcggcggaaatgtgcatggcggggtgaagcctaccaacgctactgcattagcatctcacccacgcaatcaatcccagcatcccattccctcaatcgcttctatctccggcgattcaattgcttattgatcgtatcttcaatcaagatgcaatttcttcttcgcagcgtatcgacaagcgcgatcatatgatcagctttcgcgcgccgggaaatgtgcgcggaacccctatttgtttatttttctaaatacattcaaatatgtatccgctcatgagacaataaccctgataaatgcttcaataatattgaaaaaggaagagtatgagtattcaacatttccgtgtcgcccttattcccttttttgcggcattttgccttcctgtttttgctcacccagaaacgctggtgaaagtaaaagatgctgaagatcagttgggtgcacgagtgggttacatcgaactggatctcaacagcggtaagatccttgagagttttcgccccgaagaacgttttccaatgatgagcacttttaaagttctgctatgtggcgcggtattatcccgtgttgacgccgggcaagagcaactcggtcgccgcatacactattctcagaatgacttggttgagtactcaccagtcacagaaaagcatcttacggatggcatgacagtaagagaattatgcagtgctgcaataaccatgagtgataacactgcggccaacttacttctgacaacgatcggaggaccgaaggagctaaccgcttttttgcacaacatgggggatcatgtaactcgccttgatcgttgggaaccggagctgaatgaagccataccaaacgacgagcgtgacaccacgatgcctgcagcaatggcaacaacgttgcgcaaactattaactggcgaactacttactctagcttcccggcaacaattaatagactggatggaggcggataaagttgcaggaccacttctgcgctcggcccttccggctagctggtttattgctgataaatctggagccggtgagcgtgggtctcgcggtatcattgcagcactggggccagatggtaagccctcccgtatcgtagttatctacacgacggggagtcaggcaactatggatgaacgaaatagacagatcgctgagataggtgcctcactgattaagcattggtaactgcagaccaagtttactcatatatactttagattgatttaaaacttcatttttaatttaaaaggatctaggtgaagatcctttttgataatctcatgaccaaaatcccttaacgtgagttttcgttccactgagcgtcagaccccgtagaaaagatcaaaggatcttcttgagatcctttttttctgcgcgtaatctgctgcttgcaaacaaaaaaaccaccgctaccagcggtggtttgtttgccggatcaagagctaccaactctttttccgaaggtaactggcttcagcagagcgcagataccaaatactgtccttctagtgtagccgtagttaggccaccacttcaagaactctgtagcaccgcctacatacctcgctctgctaatcctgttaccagtggctgctgccagtggcgataagtcgtgtcttaccgggttggactcaagacgatagttaccggataaggcgcagcggtcgggctgaacggggggttcgtgcacacagcccagcttggagcgaacgacctacaccgaactgagatacctacagcgtgagctatgagaaagcgccacgcttcccgaagggagaaaggcggacaggtatccggtaagcggcagggtcggaacaggagagcgcacgagggagcttccagggggaaacgcctggtatctttatagtcctgtcgggtttcgccacctctgacttgagcgtcgatttttgtgatgctcgtcaggggggcggagcctatggaaaaacgccagcaacgcggcctttttacggttcctggccttttgctgg

SEQ ID NO: 86 - DNA, 7383 bp, Artificial
  Synthetic
agacttagggaccctgcggccgccattaattcctaatttttgttgacactctatcattgatagagttattttaccactccctatcagtgatagagaaaagtgaaatgaatagaccggccgctgagaaaaagcgaagcggcactgctctttaacaatttatcagacaatctgtgtgggcactcgaagatacggattcttaacgtcgcaagacgaaaaatgaataccaagtctcaagagtgaacacgtaattcattacgaagtttaattctttgagcgtcaaacttttgaactgaagagtttgatcctggctcagattgaacgctggcggcatgccttacacatgcaagtcgaacggcagcacgggtgcttgcacctggtggcgagtggcgaacgggtgagtaatacatcggaacatgtcctgtagtgggggatagcccggcgaaagccggattaataccgcatacgatccatggatgaaagcgggggaccttcgggcctcgcgctatagggttggccgatggctgattagctagttggtggggtaaaggcctaccaaggcgacgatcagtagctggtctgagaggacgaccagccacactgggactgagacacggcccagactcctacgggaggcagcagtggggaattttggacaatgggcgaaagcctgatccagcaatgccgcgtgtgtgaagaaggccttcgggttgtaaagcacttttgtccggaaagaaatccttggctctaatacagtcgggggatgacggtaccggaagaataagcaccggctaactacgtgccagcagccgcggtaatacgtagggtgcgagcgttaatcggaattactgggcgtaaagcgtgcgcaggcggtttgctaagaccgatgtgaaatccccgggctcaacctgggaactgcattggtgactggcaggctagagtatggcagaggggggtagaattccacgtgtagcagtgaaatgcgtagagatgtggaggaataccgatggcgaaggcagccccctgggccaatactgacgctcatgcacgaaagcgtggggagcaaacaggattagataccctggtagtccacgccctaaacgatgtcaactagttgttggggattcatttccttagtaacgtagctaacgcgtgaagttgaccgcctggggagtacggtcgcaagattaaaactcaaaggaattgacggggacccgcacaagcggtggatgatgtggattaattcgatgcaacgcgaaaaaccttacctacccttgacatggtcggaatcctgctgagaggtgggagtgctcgaaagagaaccggcgcacaggtgctgcatggctgtcgtcagctcgtgtcgtgagatgttgggttaagtcccgcaacgagcgcaacccttgtccttagttgctacgcaagagcactctaaggagactgccggtgacaaaccggaggaaggtggggatgacgtcaagtcctcatggcccttatgggtagggcttcacacgtcatacaatggtcggaacagagggttgccaacccgcgagggggagctaatcccagaaaaccgatcgtagtccggattgcactctgcaactcgagtgcatgaagctggaatcgctagtaatcgcggatcagcatgccgcggtgaatacgttcccgggtcttgtacacaccgcccgtcacaccatgggagtgggttttaccagaagtggctagtctaaccgcaaggaggacggtcaccacggtaggattcatgactggggtgaagtcgtaacaaggtagccgtatcggaaggtgcggctggatcacctcctttccttaaagaagcgtactttgtagtgctcacacagattgtctgatagaaagtgaaaagcaaggcgtttacgcgttgggagtgaggctgaagagaataaggccgttcgctttctattaatgaaagctcaccctacacgaaaatatcacgcaacgcgtgataagcaattttcgtgtccccttcgtctagaggcccaggacaccgccctttcacggcggtaacaggggttcgaatcccctaggggacgccacttgctggtttgtgagtgaaagtcgccgaccttaatatctcaaaactcatcttcgggtgatgtttgagatatttgctctttaaaaatctggatcaagctgaaaattgaaacactgaacaacgagagttgttcgtgagtctctcaaattttcgcaacacgatgatgaatcgaaagaaacatcttcgggttgtgaggtcaagcgaacaagtgcatgtggtggatgccttggcgatcacaggcgatgaaggacgcggtagcctgcgaaaagctacggggagctggcaaacgagctttgatccgtagatgtccgaatggggaaacccactccttttggagtatccatggctgaatacataggccatgcgaagcgaacgcggtgaactgaaacatctaagtaaccgcaggaaaagaaatcaaccgagattcccaaagtagtggcgagcgaaatgggatgagccttgcactctttatttgtattgttagccgaacgctctggaaagtgcggccatagcaggtgatagccctgtaggcgaaaacagtatgaaagaactaggtgtgcgacaagtagggcgggacacgtgaaatcctgtctgaagatggggggaccatcctccaaggctaaatactcgtgatcgaccgatagtgaaccagtaccgtgagggaaaggcgaaaagaaccccgggaggggagtgaaatagatcctgaaaccgcatgcatacaaacagtcggagcctcgtaaggggtgacggcgtaccttttgtataatgggtcagcgacttacgttcagtagcaagcttaaccgtatagggcaggcgtagcgaaagcgagtccgaatagggcgttcagttgctgggcgtagacccgaaaccaggtgatctatccatggccaggatgaaggtgcggtaacacgtactggaggtccgaacccactaacgttgaaaagttaggggatgagctgtggataggggtgaaaggctaaacaaacctggaaatagctggttctctccgaaaactatttaggtagtgcctcgtgtctcaccttcgggggtagagcactgtcatggttggggggtctattgcagattaccccgccatagcaaactccgaataccgaagagtgcaatcacgggagacagacatcgggtgctaacgtccggtgtcaagagggaaacaacccagaccgccagctaaggtccccaaatatagctaagtgggaaacgaagtgggaaggctaaaacagtcaggaggttggcttagaagcagccaccctttaaagaaagcgtaatagctcactgatcgagtcgtcctgcgcggaagatgtaacggggctaagctatataccgaagctgcggatgcgagcttgctcgcatggtaggagagcgttccgtaagcctgcgaaggtgccttgtaaagggtgctggaggtatcggaagtgcgaatgctgacatgagtagcgataaagggggtgaaaggccccctcgccgtaagcccaaggtttcctacgcaacgttcatcggcgtagggtgagtcggcccctaaggcgaggcagaaatgcgtagctgatgggaagcaggtcaatattcctgcaccattgttagatgcgatggggggacggatcgcggaaggttgtccgggtgttggaagtcccggtcgctgcattggagaaggcgcttaggcaaatccgggcgcgtaattcaagggtgtggcgcgagctccttagggagcgaagcaattggaagtggttccaagaaaagcctctaagcttcagtctaacgatgaccgtaccgcaaaccgacacaggtgggcgagatgagtattctaaggcgcttgagagaactcgggagaaggaactcggcaaattggtaccgtaacttcgggataaggtacgcccttgtagcttgactggcctgcgccaggagggtgaaggggttgcaataaactggtggctgcgactgtttaataaaaacacagcactctgcaaacacgaaagtggacgtatagggtgtgacgcctgcccggtgccggaagattaaatgatggggtgcaagctcttgattgaagtcccggtaaacggcggccgtaactataacggtcctaaggtagcgaaattccttgtcgggtaagttccgacctgcacgaatggcgtaacgatggccacactgtctcctcccgagactcagcgaagttgaagtgtttgtgatgatgcaatctacccgcggctagacggaaagaccccatgaacctttactgtagctttgcattggactttgaaccgatctgtgtaggataggtgggaggctatgaagccggaacgctagtttcggtggagccgtccttgaaataccaccctggtttgtttgaggttctaaccttggcccgtgatccgggtcggggacagtgcatggtaggcagtttgactggggcggtctcctcccaaagcgtaacggaggagtacgaaggtacgctaggtacggtcggaaatcgtgctgatagtgcaatggcataagcgtgcttaactgcgagaccgacaagtcgagcaggtgcgaaagcaggtcatagtgatccggtggttctgtatggaagggccatcgctcaacggataaaaggtactctggggataacaggctgataccgcccaagagttcatatcgacggcggtgtttggcacctcgatgtcggctcatctcatcctggggctgtagccggtcccaagggtatggctgttcgccatttaaagaggtacgtgagctgggtttaaaacgtcgtgagacagtttggtccctatctgccgtgggcgttggatatttgaagggggctgctcctagtacgagaggaccggagtggacgaacctctggtgtaccggttgtcacgccagtggcatcgccgggtagctatgttcggaagagataaccgctgaaagcatctaagcgggaaactcgccttaagatgagatatccctggggactagatccccttgaagggtcgttcgagaccaggacgttgataggtcaggtgtgtaagcgcagtaatgcgttcagctaactgatactaattgcccgtaaggcttgatcctacaacgccgaagctgttttggcggatgagagaagattttcagcctgatacagattaaatcagaacgcagaagcggtctgataaaacagaatttgcctgatgaccatagcgagtcggtcccaccccttcccatcccgaacaggaccgtgaaacgactctacgccgatgatagtgcggattcccgtgtgaaagtaggtaatcgtcaggctccaaataaaacgaaaggctcagtcgaaagactgggcctttcgttttatctgttgtttgtcggtgaacgctctcctgagtaggacaaatccgccgggagcggatttgaacgttgcgaagcaacggcccggagggtggcgggcaggacgcccgccataaactgccaggcatcaaattaagcagaaggccatcctgacggatggcctttttgcgtttctacaaactcttcctgtcgtcatatctacaagccggcgcgccgggaaatgtgcgcggaacccctatttgtttatttttctaaatacattcaaatatgtatccgctcatgagacaataaccctgataaatgcttcaataatattgaaaaaggaagagtatgagtattcaacatttccgtgtcgcccttattcccttttttgcggcattttgccttcctgtttttgctcacccagaaacgctggtgaaagtaaaagatgctgaagatcagttgggtgcacgagtgggttacatcgaactggatctcaacagcggtaagatccttgagagttttcgccccgaagaacgttttccaatgatgagcacttttaaagttctgctatgtggcgcggtattatcccgtgttgacgccgggcaagagcaactcggtcgccgcatacactattctcagaatgacttggttgagtactcaccagtcacagaaaagcatcttacggatggcatgacagtaagagaattatgcagtgctgcaataaccatgagtgataacactgcggccaacttacttctgacaacgatcggaggaccgaaggagctaaccgcttttttgcacaacatgggggatcatgtaactcgccttgatcgttgggaaccggagctgaatgaagccataccaaacgacgagcgtgacaccacgatgcctgcagcaatggcaacaacgttgcgcaaactattaactggcgaactacttactctagcttcccggcaacaattaatagactggatggaggcggataaagttgcaggaccacttctgcgctcggcccttccggctagctggtttattgctgataaatctggagccggtgagcgtgggtctcgcggtatcattgcagcactggggccagatggtaagccctcccgtatcgtagttatctacacgacggggagtcaggcaactatggatgaacgaaatagacagatcgctgagataggtgcctcactgattaagcattggtaactgcagaccaagtttactcatatatactttagattgatttaaaacttcatttttaatttaaaaggatctaggtgaagatcctttttgataatctcatgaccaaaatcccttaacgtgagttttcgttccactgagcgtcagaccccgtagaaaagatcaaaggatcttcttgagatcctttttttctgcgcgtaatctgctgcttgcaaacaaaaaaaccaccgctaccagcggtggtttgtttgccggatcaagagctaccaactctttttccgaaggtaactggcttcagcagagcgcagataccaaatactgtccttctagtgtagccgtagttaggccaccacttcaagaactctgtagcaccgcctacatacctcgctctgctaatcctgttaccagtggctgctgccagtggcgataagtcgtgtcttaccgggttggactcaagacgatagttaccggataaggcgcagcggtcgggctgaacggggggttcgtgcacacagcccagcttggagcgaacgacctacaccgaactgagatacctacagcgtgagctatgagaaagcgccacgcttcccgaagggagaaaggcggacaggtatccggtaagcggcagggtcggaacaggagagcgcacgagggagcttccagggggaaacgcctggtatctttatagtcctgtcgggtttcgccacctctgacttgagcgtcgatttttgtgatgctcgtcaggggggcggagcctatggaaaaacgccagcaacgcggcctttttacggttcctggccttttgctgg

SEQ ID NO: 87 - DNA, 7530 bp, Artificial
  Synthetic
agacttagggaccctgcggccgccattaattcctaatttttgttgacactctatcattgatagagttattttaccactccctatcagtgatagagaaaagtgaaatgaatagaccggccgctgagaaaaagcgaagcggcatgaaagcgagctgatcctcggatcagatagcgaaagtatcaagagtctcacactaaagtaagtcaggtttatgaagtgattcatattcctgtcagctttgagtgagcgaccggttcttaaccgaaccgaaaacagtaacaggtttgaactgaagagtttgatcctggctcagattgaacgctggcggcatgccttacacatgcaagtcgaacggcagcacgggtgcttgcacctggtggcgagtggcgaacgggtgagtaatacatcggaacatgtcctgtagtgggggatagcccggcgaaagccggattaataccgcatacgatccatggatgaaagcgggggaccttcgggcctcgcgctatagggttggccgatggctgattagctagttggtggggtaaaggcctaccaaggcgacgatcagtagctggtctgagaggacgaccagccacactgggactgagacacggcccagactcctacgggaggcagcagtggggaattttggacaatgggcgaaagcctgatccagcaatgccgcgtgtgtgaagaaggccttcgggttgtaaagcacttttgtccggaaagaaatccttggctctaatacagtcgggggatgacggtaccggaagaataagcaccggctaactacgtgccagcagccgcggtaatacgtagggtgcgagcgttaatcggaattactgggcgtaaagcgtgcgcaggcggtttgctaagaccgatgtgaaatccccgggctcaacctgggaactgcattggtgactggcaggctagagtatggcagaggggggtagaattccacgtgtagcagtgaaatgcgtagagatgtggaggaataccgatggcgaaggcagccccctgggccaatactgacgctcatgcacgaaagcgtggggagcaaacaggattagataccctggtagtccacgccctaaacgatgtcaactagttgttggggattcatttccttagtaacgtagctaacgcgtgaagttgaccgcctggggagtacggtcgcaagattaaaactcaaaggaattgacggggacccgcacaagcggtggatgatgtggattaattcgatgcaacgcgaaaaaccttacctacccttgacatggtcggaatcctgctgagaggtgggagtgctcgaaagagaaccggcgcacaggtgctgcatggctgtcgtcagctcgtgtcgtgagatgttgggttaagtcccgcaacgagcgcaacccttgtccttagttgctacgcaagagcactctaaggagactgccggtgacaaaccggaggaaggtggggatgacgtcaagtcctcatggcccttatgggtagggcttcacacgtcatacaatggtcggaacagagggttgccaacccgcgagggggagctaatcccagaaaaccgatcgtagtccggattgcactctgcaactcgagtgcatgaagctggaatcgctagtaatcgcggatcagcatgccgcggtgaatacgttcccgggtcttgtacacaccgcccgtcacaccatgggagtgggttttaccagaagtggctagtctaaccgcaaggaggacggtcaccacggtaggattcatgactggggtgaagtcgtaacaaggtagccgtatcggaaggtgcggctggatcatgtggtttccagagctatctcgcgaagttgagcgctcacgcttatcggctgtaaattaaagacagactcaggggtctgtagctcagtcggttagagcaccgtcttgataaggcgggggtcgttggttcgaatccaaccagacccaccaccgtcttgtgtggcggtacacacctgaggaattctgtacatgggggcatagctcagctgggagagcacctgctttgcaagcagggggtcgtcggttcgatcccgtctgcctccaccaatcctcaatgacaaacattcgaatgatgattgttcgagtctttgtcattggcgattgagccagtcagagcggtacgaaagtatcggctgtcgttctttaacaatctggaagaagtaagtaatttggatagcggaagcgtctcgagatggacgtggaagttatccgggttgtgattgtatcgatgtatctcaagatgattcgaactttaagtttgactcaattggaatacggcacaacgcgagaactcaacctgtaacgagacagactcgttatagggtcaagcgaacaagtgcatgtggtggatgccttggcgatcacaggcgatgaaggacgcggtagcctgcgaaaagctacggggagctggcaaacgagctttgatccgtagatgtccgaatggggaaacccactccttttggagtatccatggctgaatacataggccatgcgaagcgaacgcggtgaactgaaacatctaagtaaccgcaggaaaagaaatcaaccgagattcccaaagtagtggcgagcgaaatgggatgagccttgcactctttatttgtattgttagccgaacgctctggaaagtgcggccatagcaggtgatagccctgtaggcgaaaacagtatgaaagaactaggtgtgcgacaagtagggcgggacacgtgaaatcctgtctgaagatggggggaccatcctccaaggctaaatactcgtgatcgaccgatagtgaaccagtaccgtgagggaaaggcgaaaagaaccccgggaggggagtgaaatagatcctgaaaccgcatgcatacaaacagtcggagcctcgtaaggggtgacggcgtaccttttgtataatgggtcagcgacttacgttcagtagcaagcttaaccgtatagggcaggcgtagcgaaagcgagtccgaatagggcgttcagttgctgggcgtagacccgaaaccaggtgatctatccatggccaggatgaaggtgcggtaacacgtactggaggtccgaacccactaacgttgaaaagttaggggatgagctgtggataggggtgaaaggctaaacaaacctggaaatagctggttctctccgaaaactatttaggtagtgcctcgtgtctcaccttcgggggtagagcactgtcatggttggggggtctattgcagattaccccgccatagcaaactccgaataccgaagagtgcaatcacgggagacagacatcgggtgctaacgtccggtgtcaagagggaaacaacccagaccgccagctaaggtccccaaatatagctaagtgggaaacgaagtgggaaggctaaaacagtcaggaggttggcttagaagcagccaccctttaaagaaagcgtaatagctcactgatcgagtcgtcctgcgcggaagatgtaacggggctaagctatataccgaagctgcggatgcgagcttgctcgcatggtaggagagcgttccgtaagcctgcgaaggtgccttgtaaagggtgctggaggtatcggaagtgcgaatgctgacatgagtagcgataaagggggtgaaaggccccctcgccgtaagcccaaggtttcctacgcaacgttcatcggcgtagggtgagtcggcccctaaggcgaggcagaaatgcgtagctgatgggaagcaggtcaatattcctgcaccattgttagatgcgatggggggacggatcgcggaaggttgtccgggtgttggaagtcccggtcgctgcattggagaaggcgcttaggcaaatccgggcgcgtaattcaagggtgtggcgcgagctccttagggagcgaagcaattggaagtggttccaagaaaagcctctaagcttcagtctaacgatgaccgtaccgcaaaccgacacaggtgggcgagatgagtattctaaggcgcttgagagaactcgggagaaggaactcggcaaattggtaccgtaacttcgggataaggtacgcccttgtagcttgactggcctgcgccaggagggtgaaggggttgcaataaactggtggctgcgactgtttaataaaaacacagcactctgcaaacacgaaagtggacgtatagggtgtgacgcctgcccggtgccggaagattaaatgatggggtgcaagctcttgattgaagtcccggtaaacggcggccgtaactataacggtcctaaggtagcgaaattccttgtcgggtaagttccgacctgcacgaatggcgtaacgatggccacactgtctcctcccgagactcagcgaagttgaagtgtttgtgatgatgcaatctacccgcggctagacggaaagaccccatgaacctttactgtagctttgcattggactttgaaccgatctgtgtaggataggtgggaggctatgaagccggaacgctagtttcggtggagccgtccttgaaataccaccctggtttgtttgaggttctaaccttggcccgtgatccgggtcggggacagtgcatggtaggcagtttgactggggcggtctcctcccaaagcgtaacggaggagtacgaaggtacgctaggtacggtcggaaatcgtgctgatagtgcaatggcataagcgtgcttaactgcgagaccgacaagtcgagcaggtgcgaaagcaggtcatagtgatccggtggttctgtatggaagggccatcgctcaacggataaaaggtactctggggataacaggctgataccgcccaagagttcatatcgacggcggtgtttggcacctcgatgtcggctcatctcatcctggggctgtagccggtcccaagggtatggctgttcgccatttaaagaggtacgtgagctgggtttaaaacgtcgtgagacagtttggtccctatctgccgtgggcgttggatatttgaagggggctgctcctagtacgagaggaccggagtggacgaacctctggtgtaccggttgtcacgccagtggcatcgccgggtagctatgttcggaagagataaccgctgaaagcatctaagcgggaaactcgccttaagatgagatatccctggggactagatccccttgaagggtcgttcgagaccaggacgttgataggtcaggtgtgtaagcgcagtaatgcgttcagctaactgatactaattgcccgtaaggcttgatcctataacaagtctgccttgtagatcggcgccgtgtgaaagcactggccgcgatccagagcgacatgttggattctcgtgtgtgatacacacaacctaattactgcttcttccaagattggttgcgctgcgaagcaacgcaacaaccccctttgcctgatgaccatagcgagtcggtcccaccccttcccatcccgaacaggaccgtgaaacgactctacgccgatgatagtgcggattcccgtgtgaaagtaggtaatcgtcaggctccctaagccaggaacccccgcccgaaaggcgggggtttttgcatttcagcggcggaaatgtgcatggcggggtgaagcctaccaacgctactgcattagcatctcacccacgcaatcaatcccagcatcccattccctcaatcgcttctatctccggcgattcaattgcttattgatcgtatcttcaatcaagatgcaatttcttcttcgcagcgtatcgacaagcgcgatcatatgatcagctttcgcgcgccgggaaatgtgcgcggaacccctatttgtttatttttctaaatacattcaaatatgtatccgctcatgagacaataaccctgataaatgcttcaataatattgaaaaaggaagagtatgagtattcaacatttccgtgtcgcccttattcccttttttgcggcattttgccttcctgtttttgctcacccagaaacgctggtgaaagtaaaagatgctgaagatcagttgggtgcacgagtgggttacatcgaactggatctcaacagcggtaagatccttgagagttttcgccccgaagaacgttttccaatgatgagcacttttaaagttctgctatgtggcgcggtattatcccgtgttgacgccgggcaagagcaactcggtcgccgcatacactattctcagaatgacttggttgagtactcaccagtcacagaaaagcatcttacggatggcatgacagtaagagaattatgcagtgctgcaataaccatgagtgataacactgcggccaacttacttctgacaacgatcggaggaccgaaggagctaaccgcttttttgcacaacatgggggatcatgtaactcgccttgatcgttgggaaccggagctgaatgaagccataccaaacgacgagcgtgacaccacgatgcctgcagcaatggcaacaacgttgcgcaaactattaactggcgaactacttactctagcttcccggcaacaattaatagactggatggaggcggataaagttgcaggaccacttctgcgctcggcccttccggctagctggtttattgctgataaatctggagccggtgagcgtgggtctcgcggtatcattgcagcactggggccagatggtaagccctcccgtatcgtagttatctacacgacggggagtcaggcaactatggatgaacgaaatagacagatcgctgagataggtgcctcactgattaagcattggtaactgcagaccaagtttactcatatatactttagattgatttaaaacttcatttttaatttaaaaggatctaggtgaagatcctttttgataatctcatgaccaaaatcccttaacgtgagttttcgttccactgagcgtcagaccccgtagaaaagatcaaaggatcttcttgagatcctttttttctgcgcgtaatctgctgcttgcaaacaaaaaaaccaccgctaccagcggtggtttgtttgccggatcaagagctaccaactctttttccgaaggtaactggcttcagcagagcgcagataccaaatactgtccttctagtgtagccgtagttaggccaccacttcaagaactctgtagcaccgcctacatacctcgctctgctaatcctgttaccagtggctgctgccagtggcgataagtcgtgtcttaccgggttggactcaagacgatagttaccggataaggcgcagcggtcgggctgaacggggggttcgtgcacacagcccagcttggagcgaacgacctacaccgaactgagatacctacagcgtgagctatgagaaagcgccacgcttcccgaagggagaaaggcggacaggtatccggtaagcggcagggtcggaacaggagagcgcacgagggagcttccagggggaaacgcctggtatctttatagtcctgtcgggtttcgccacctctgacttgagcgtcgatttttgtgatgctcgtcaggggggcggagcctatggaaaaacgccagcaacgcggcctttttacggttcctggccttttgctgg

SEQ ID NO: 88 - DNA, 7569 bp, Artificial
  Synthetic
agacttagggaccctgcggccgccattaattcctaatttttgttgacactctatcattgatagagttattttaccactccctatcagtgatagagaaaagtgaaatgaatagaccggccgctgagaaaaagcgaagcggctttcgcaacgctctttaacaaaacagattaccgataagtgtgagtgccttgggcctcgcactgtttgaaagacagacgagatgatgttttgaacattgtcctgtcggtttctttgaagcagaccagaagttaaaaagttagagattgaacataagagtttgatcctggctcagattgaacgctggcggcatgctttacacatgcaagtcggacggcagcacagggaagcttgcttctcgggtggcgagtggcgaacgggtgagtaacatatcggaacgtaccgggtagcgggggataactgatcgaaagatcagctaataccgcatacgtcttgagagggaaagcaggggaccttcgggccttgcgctatccgagcggccgatatctgattagctggttggcggggtaaaggcccaccaaggcgacgatcagtagcgggtctgagaggatgatccgccacactgggactgagacacggcccagactcctacgggaggcagcagtggggaattttggacaatgggcgcaagcctgatccagccatgccgcgtgtctgaagaaggccttcgggttgtaaaggacttttgtcagggaagaaaaggccgttgccaatatcggcggccgatgacggtacctgaagaataagcaccggctaactacgtgccagcagccgcggtaatacgtagggtgcgagcgttaatcggaattactgggcgtaaagcgggcgcagacggttacttaagcaggatgtgaaatccccgggctcaacccgggaactgcgttctgaactgggtgactcgagtgtgtcagagggaggtggaattccacgtgtagcagtgaaatgcgtagagatgtggaggaataccgatggcgaaggcagcctcctgggataacactgacgttcatgtccgaaagcgtgggtagcaaacaggattagataccctggtagtccacgccctaaacgatgtcaattagctgttgggcaacttgattgcttggtagcgtagctaacgcgtgaaattgaccgcctggggagtacggtcgcaagattaaaactcaaaggaattgacggggacccgcacaagcggtggatgatgtggattaattcgatgcaacgcgaagaaccttacctggttttgacatgtgcggaatcctccggagacggaggagtgccttcgggagccgtaacacaggtgctgcatggctgtcgtcagctcgtgtcgtgagatgttgggttaagtcccgcaacgagcgcaacccttgtcattagttgccatcattcggttgggcactctaatgagactgccggtgacaagccggaggaaggtggggatgacgtcaagtcctcatggcccttatgaccagggcttcacacgtcatacaatggtcggtacagagggtagccaagccgcgaggcggagccaatctcacaaaaccgatcgtagtccggattgcactctgcaactcgagtgcatgaagtcggaatcgctagtaatcgcaggtcagcatactgcggtgaatacgttcccgggtcttgtacacaccgcccgtcacaccatgggagtgggggataccagaagtaggtagggtaaccgcaaggagtccgcttaccacggtatgcttcatgactggggtgaagtcgtaacaaggtagccgtaggggaacctgcggctggatcacctcctttctagagaaagaaggggctttaggcattcacacttatcggtaaactgaaaagatgcggaagaagcttgagtgaaggcaaggttcgcttaagaagggaaaccgggtttgtagctcagctggttagagcacacgcttgataagcgtggggtcggaggttcaagtcctcccagacccaccaagaacgggggcatagctcagttggtagagcacctgctttgcaagcagggggtcatcggttcgatcccgtttgcctccaccaaaactttacaaatgaaagcaagtttgctgtttttagcagcttattttgatttgcgaagtagaataacgacgcatcgatctttaacaaattggaaagccgaaatcaacaaacaaagacaatgagtttgttttgattttttattctttgcaaaggataaaaaatctctcgcaagagaaaagaaaacaaacatagtatttgggtgatgattgtatcgacttaatcctgaaacacaaaaggcaggattaagacacaacaaagcagtaagctttatcaaagtagggatttcaagtttgcttacttagtcaacgggtaggtaaacgaagtcaaagaagttcttgaaatgatagagtcaagtgaataagtgcatcaggcggatgccttggcgatgataggcgacgaaggacgtgtaagcctgcgaaaagcgcgggggagctggcaataaagctatgattccgcgatgtccgaatggggaaacccactgcattctgtgcagtatcctaagttgaatacataggcttagagaagcgaacccggagaactgaaccatctaagtacccggaggaaaagaaatcaaccgagattccgcaagtagtggcgagcgaacgcggaggagcctgtacgtaataactgtcgagatagaagaacaagctgggaagcttgaccatagcgggtgacagtcccgtattcgaaatctcaacagcggtactaagcgtacgaaaagtagggcgggacacgtgaaatcctgtctgaatatggggggaccatcctccaaggctaaatactcatcatcgaccgatagtgaaccagtaccgtgagggaaaggcgaaaagaaccccgggaggggagtgaaacagaacctgaaacctgatgcatacaaacagtgggagcgccctagtggtgtgactgcgtaccttttgtataatgggtcaacgacttacattcagtagcgagcttaaccggataggggaggcgtagggaaaccgagtcttaatagggcgatgagttgctgggtgtagacccgaaaccgagtgatctatccatggtcaggttgaaggtgccgtaacaggtactggaggaccgaacccacgcatgttgcaaaatgcggggatgagctgtgggtaggggtgaaaggctaaacaaactcggagatagctggttctccccgaaaactatttaggtagtgcctcgagcaagacactgatgggggtaaagcactgttatggctagggggttattgcaacttaccaacccatggcaaactcagaataccatcaagtggttcctcgggagacagacagcgggtgctaacgtccgttgtcaagagggaaacaacccagaccgccggctaaggtcccaaatgatagattaagtggtaaacgaagtgggaaggcacagacagccaggatgttggcttagaagcagccatcatttaaagaaagcgtaatagctcactggtcgagtcgtcctgcgcggaagatgtaacggggctcaaatctataaccgaagctgcggatgccggtttaccggcatggtaggggagcgttctgtaggctgatgaaggtgcattgtaaagtgtgctggaggtatcagaagtgcgaatgttgacatgagtagcgataaagcgggtgaaaagcccgctcgccgaaagcccaaggtttcctacgcaacgttcatcggcgtagggtaagtcggcccctaaggcgaggcagaaatgcgtagtcgatgggaaacaggttaatattcctgtacttgattcaaatgcgatgtggggacggagaaggttaggttggcaagctgttggaatagcttgtttaagccggtaggtggaagacttaggcaaatccgggttttcttaacaccgagaagtgatgacgagtgtctacggacacgaagcaaccgataccacgcttccaggaaaagccactaagcttcagtttgaatcgaaccgtaccgcaaaccgacacaggtgggcaggatgagaattctaaggcgcttgagagaactcgggagaaggaactcggcaaattgataccgtaacttcgggagaaggtatgccctctaaggttaaggacttgctccgtaagccccggagggtcgcagagaataggtggctgcgactgtttattaaaaacacagcactctgccaacacgaaagtggacgtatagggtgtgacgcctgcccggtgccggaaggttaattgaagatgtgcaagcatcggatcgaagccccggtaaacggcggccgtaactataacggtcctaaggtagcgaaattccttgtcgggtaagttccgacccgcacgaatggcgtaacgatggccacactgtctcctcccgagactcagcgaagttgaagtggttgtgaagatgcaatctacccgctgctagacggaaagaccccgtgaacctttactgtagctttgcattggactttgaagtcacttgtgtaggataggtgggaggcttggaagcagagacgccagtctctgtggagtcgtccttgaaataccaccctggtgtctttgaggttctaacccagacccgtcatccgggtcggggaccgtgcatggtaggcagtttgactggggcggtctcctcccaaagcgtaacggaggagttcgaaggttacctaggtccggtcggaaatcggactgatagtgcaatggcaaaaggtagcttaactgcgagaccgacaagtcgggcaggtgcgaaagcaggacatagtgatccggtggttctgtatggaagggccatcgctcaacggataaaaggtactccggggataacaggctgattccgcccaagagttcatatcgacggcggagtttggcacctcgatgtcggctcatcacatcctggggctgtagtcggtcccaagggtatggctgttcgccatttaaagtggtacgtgagctgggtttaaaacgtcgtgagacagtttggtccctatctgcagtgggcgttggaagtttgacgggggctgctcctagtacgagaggaccggagtggacgaacctctggtgtaccggttgtaacgccagttgcatagccgggtagctaagttcggaagagataagcgctgaaagcatctaagcgcgaaactcgcctgaagatgagacttcccttgcggtttaaccgcactaaagggtcgttcgagaccaggacgttgataggtggggtgtggaagcgcggtaacgcgtgaagctaacccatactaattgcccgtgaggcttgactctatcatttgaaggacttcaagagataaaagcttactgactgattcagtcattaccgaatatattgattaaggctttaccgatttgcaacagtttaagtttggcggccatagcgagttggtcccacgccttcccatcccgaacaggaccgtgaaacgactcagcgccgatgatagtgtggttcttccatgcgaaagtaggtcactgccaaacaccatttcagaaaacccccggatatccgggggtttttgctttgcccggaaaaaatgtcggggatggcgggacggcatctgtacggtgtccggtcgggtttgcggaggaacggcttgaaactttgggatattcattttagaatgacccgttttatagcggattaacaaaaatcaggacaaggcggcgggccgcaggcagtacggatagtacggaaccggttcgcccggtgcttcatcaccttagggaatcgcgcgccgggaaatgtgcgcggaacccctatttgtttatttttctaaatacattcaaatatgtatccgctcatgagacaataaccctgataaatgcttcaataatattgaaaaaggaagagtatgagtattcaacatttccgtgtcgcccttattcccttttttgcggcattttgccttcctgtttttgctcacccagaaacgctggtgaaagtaaaagatgctgaagatcagttgggtgcacgagtgggttacatcgaactggatctcaacagcggtaagatccttgagagttttcgccccgaagaacgttttccaatgatgagcacttttaaagttctgctatgtggcgcggtattatcccgtgttgacgccgggcaagagcaactcggtcgccgcatacactattctcagaatgacttggttgagtactcaccagtcacagaaaagcatcttacggatggcatgacagtaagagaattatgcagtgctgcaataaccatgagtgataacactgcggccaacttacttctgacaacgatcggaggaccgaaggagctaaccgcttttttgcacaacatgggggatcatgtaactcgccttgatcgttgggaaccggagctgaatgaagccataccaaacgacgagcgtgacaccacgatgcctgcagcaatggcaacaacgttgcgcaaactattaactggcgaactacttactctagcttcccggcaacaattaatagactggatggaggcggataaagttgcaggaccacttctgcgctcggcccttccggctagctggtttattgctgataaatctggagccggtgagcgtgggtctcgcggtatcattgcagcactggggccagatggtaagccctcccgtatcgtagttatctacacgacggggagtcaggcaactatggatgaacgaaatagacagatcgctgagataggtgcctcactgattaagcattggtaactgcagaccaagtttactcatatatactttagattgatttaaaacttcatttttaatttaaaaggatctaggtgaagatcctttttgataatctcatgaccaaaatcccttaacgtgagttttcgttccactgagcgtcagaccccgtagaaaagatcaaaggatcttcttgagatcctttttttctgcgcgtaatctgctgcttgcaaacaaaaaaaccaccgctaccagcggtggtttgtttgccggatcaagagctaccaactctttttccgaaggtaactggcttcagcagagcgcagataccaaatactgtccttctagtgtagccgtagttaggccaccacttcaagaactctgtagcaccgcctacatacctcgctctgctaatcctgttaccagtggctgctgccagtggcgataagtcgtgtcttaccgggttggactcaagacgatagttaccggataaggcgcagcggtcgggctgaacggggggttcgtgcacacagcccagcttggagcgaacgacctacaccgaactgagatacctacagcgtgagctatgagaaagcgccacgcttcccgaagggagaaaggcggacaggtatccggtaagcggcagggtcggaacaggagagcgcacgagggagcttccagggggaaacgcctggtatctttatagtcctgtcgggtttcgccacctctgacttgagcgtcgatttttgtgatgctcgtcaggggggcggagcctatggaaaaacgccagcaacgcggcctttttacggttcctggccttttgctgg

SEQ ID NO: 89 - DNA, 7404 bp, Artificial
  Synthetic
agacttagggaccctgcggccgccattaattcctaatttttgttgacactctatcattgatagagttattttaccactccctatcagtgatagagaaaagtgaaatgaatagaccggccgctgagaaaaagcgaagcggcactgctctttaacaatttatcagacaatctgtgtgggcactcgaagatacggattcttaacgtcgcaagacgaaaaatgaataccaagtctcaagagtgaacacgtaattcattacgaagtttaattctttgagcgtcaaacttttgaacataagagtttgatcctggctcagattgaacgctggcggcatgctttacacatgcaagtcggacggcagcacagggaagcttgcttctcgggtggcgagtggcgaacgggtgagtaacatatcggaacgtaccgggtagcgggggataactgatcgaaagatcagctaataccgcatacgtcttgagagggaaagcaggggaccttcgggccttgcgctatccgagcggccgatatctgattagctggttggcggggtaaaggcccaccaaggcgacgatcagtagcgggtctgagaggatgatccgccacactgggactgagacacggcccagactcctacgggaggcagcagtggggaattttggacaatgggcgcaagcctgatccagccatgccgcgtgtctgaagaaggccttcgggttgtaaaggacttttgtcagggaagaaaaggccgttgccaatatcggcggccgatgacggtacctgaagaataagcaccggctaactacgtgccagcagccgcggtaatacgtagggtgcgagcgttaatcggaattactgggcgtaaagcgggcgcagacggttacttaagcaggatgtgaaatccccgggctcaacccgggaactgcgttctgaactgggtgactcgagtgtgtcagagggaggtggaattccacgtgtagcagtgaaatgcgtagagatgtggaggaataccgatggcgaaggcagcctcctgggataacactgacgttcatgtccgaaagcgtgggtagcaaacaggattagataccctggtagtccacgccctaaacgatgtcaattagctgttgggcaacttgattgcttggtagcgtagctaacgcgtgaaattgaccgcctggggagtacggtcgcaagattaaaactcaaaggaattgacggggacccgcacaagcggtggatgatgtggattaattcgatgcaacgcgaagaaccttacctggttttgacatgtgcggaatcctccggagacggaggagtgccttcgggagccgtaacacaggtgctgcatggctgtcgtcagctcgtgtcgtgagatgttgggttaagtcccgcaacgagcgcaacccttgtcattagttgccatcattcggttgggcactctaatgagactgccggtgacaagccggaggaaggtggggatgacgtcaagtcctcatggcccttatgaccagggcttcacacgtcatacaatggtcggtacagagggtagccaagccgcgaggcggagccaatctcacaaaaccgatcgtagtccggattgcactctgcaactcgagtgcatgaagtcggaatcgctagtaatcgcaggtcagcatactgcggtgaatacgttcccgggtcttgtacacaccgcccgtcacaccatgggagtgggggataccagaagtaggtagggtaaccgcaaggagtccgcttaccacggtatgcttcatgactggggtgaagtcgtaacaaggtagccgtaggggaacctgcggctggatcaacctcctttccttaaagaagcgtactttgtagtgctcacacagattgtctgatagaaagtgaaaagcaaggcgtttacgcgttgggagtgaggctgaagagaataaggccgttcgctttctattaatgaaagctcaccctacacgaaaatatcacgcaacgcgtgataagcaattttcgtgtccccttcgtctagaggcccaggacaccgccctttcacggcggtaacaggggttcgaatcccctaggggacgccacttgctggtttgtgagtgaaagtcgccgaccttaatatctcaaaactcatcttcgggtgatgtttgagatatttgctctttaaaaatctggatcaagctgaaaattgaaacactgaacaacgagagttgttcgtgagtctctcaaattttcgcaacacgatgatgaatcgaaagaaacatcttcgggttgtgaagtcaagtgaataagtgcatcaggcggatgccttggcgatgataggcgacgaaggacgtgtaagcctgcgaaaagcgcgggggagctggcaataaagctatgattccgcgatgtccgaatggggaaacccactgcattctgtgcagtatcctaagttgaatacataggcttagagaagcgaacccggagaactgaaccatctaagtacccggaggaaaagaaatcaaccgagattccgcaagtagtggcgagcgaacgcggaggagcctgtacgtaataactgtcgagatagaagaacaagctgggaagcttgaccatagcgggtgacagtcccgtattcgaaatctcaacagcggtactaagcgtacgaaaagtagggcgggacacgtgaaatcctgtctgaatatggggggaccatcctccaaggctaaatactcatcatcgaccgatagtgaaccagtaccgtgagggaaaggcgaaaagaaccccgggaggggagtgaaacagaacctgaaacctgatgcatacaaacagtgggagcgccctagtggtgtgactgcgtaccttttgtataatgggtcaacgacttacattcagtagcgagcttaaccggataggggaggcgtagggaaaccgagtcttaatagggcgatgagttgctgggtgtagacccgaaaccgagtgatctatccatggtcaggttgaaggtgccgtaacaggtactggaggaccgaacccacgcatgttgcaaaatgcggggatgagctgtgggtaggggtgaaaggctaaacaaactcggagatagctggttctccccgaaaactatttaggtagtgcctcgagcaagacactgatgggggtaaagcactgttatggctagggggttattgcaacttaccaacccatggcaaactcagaataccatcaagtggttcctcgggagacagacagcgggtgctaacgtccgttgtcaagagggaaacaacccagaccgccggctaaggtcccaaatgatagattaagtggtaaacgaagtgggaaggcacagacagccaggatgttggcttagaagcagccatcatttaaagaaagcgtaatagctcactggtcgagtcgtcctgcgcggaagatgtaacggggctcaaatctataaccgaagctgcggatgccggtttaccggcatggtaggggagcgttctgtaggctgatgaaggtgcattgtaaagtgtgctggaggtatcagaagtgcgaatgttgacatgagtagcgataaagcgggtgaaaagcccgctcgccgaaagcccaaggtttcctacgcaacgttcatcggcgtagggtaagtcggcccctaaggcgaggcagaaatgcgtagtcgatgggaaacaggttaatattcctgtacttgattcaaatgcgatgtggggacggagaaggttaggttggcaagctgttggaatagcttgtttaagccggtaggtggaagacttaggcaaatccgggttttcttaacaccgagaagtgatgacgagtgtctacggacacgaagcaaccgataccacgcttccaggaaaagccactaagcttcagtttgaatcgaaccgtaccgcaaaccgacacaggtgggcaggatgagaattctaaggcgcttgagagaactcgggagaaggaactcggcaaattgataccgtaacttcgggagaaggtatgccctctaaggttaaggacttgctccgtaagccccggagggtcgcagagaataggtggctgcgactgtttattaaaaacacagcactctgccaacacgaaagtggacgtatagggtgtgacgcctgcccggtgccggaaggttaattgaagatgtgcaagcatcggatcgaagccccggtaaacggcggccgtaactataacggtcctaaggtagcgaaattccttgtcgggtaagttccgacccgcacgaatggcgtaacgatggccacactgtctcctcccgagactcagcgaagttgaagtggttgtgaagatgcaatctacccgctgctagacggaaagaccccgtgaacctttactgtagctttgcattggactttgaagtcacttgtgtaggataggtgggaggcttggaagcagagacgccagtctctgtggagtcgtccttgaaataccaccctggtgtctttgaggttctaacccagacccgtcatccgggtcggggaccgtgcatggtaggcagtttgactggggcggtctcctcccaaagcgtaacggaggagttcgaaggttacctaggtccggtcggaaatcggactgatagtgcaatggcaaaaggtagcttaactgcgagaccgacaagtcgggcaggtgcgaaagcaggacatagtgatccggtggttctgtatggaagggccatcgctcaacggataaaaggtactccggggataacaggctgattccgcccaagagttcatatcgacggcggagtttggcacctcgatgtcggctcatcacatcctggggctgtagtcggtcccaagggtatggctgttcgccatttaaagtggtacgtgagctgggtttaaaacgtcgtgagacagtttggtccctatctgcagtgggcgttggaagtttgacgggggctgctcctagtacgagaggaccggagtggacgaacctctggtgtaccggttgtaacgccagttgcatagccgggtagctaagttcggaagagataagcgctgaaagcatctaagcgcgaaactcgcctgaagatgagacttcccttgcggtttaaccgcactaaagggtcgttcgagaccaggacgttgataggtggggtgtggaagcgcggtaacgcgtgaagctaacccatactaattgcccgtgaggcttgactctacaacgccgaagctgttttggcggatgagagaagattttcagcctgatacagattaaatcagaacgcagaagcggtctgataaaacagaatttgtttggcggccatagcgagttggtcccacgccttcccatcccgaacaggaccgtgaaacgactcagcgccgatgatagtgtggttcttccatgcgaaagtaggtcactgccaaacaccaaataaaacgaaaggctcagtcgaaagactgggcttttcgttttatctgttgtttgtcggtgaacgctctcctgagtaggacaaatccgccgggagcggatttgaacgttgcgaagcaacggcccggagggtggcgggcaggacgcccgccataaactgccaggcatcaaattaagcagaaggccatcctgacggatggcctttttgcgtttctacaaactcttcctgtcgtcatatctacaagccggcgcgccgggaaatgtgcgcggaacccctatttgtttatttttctaaatacattcaaatatgtatccgctcatgagacaataaccctgataaatgcttcaataatattgaaaaaggaagagtatgagtattcaacatttccgtgtcgcccttattcccttttttgcggcattttgccttcctgtttttgctcacccagaaacgctggtgaaagtaaaagatgctgaagatcagttgggtgcacgagtgggttacatcgaactggatctcaacagcggtaagatccttgagagttttcgccccgaagaacgttttccaatgatgagcacttttaaagttctgctatgtggcgcggtattatcccgtgttgacgccgggcaagagcaactcggtcgccgcatacactattctcagaatgacttggttgagtactcaccagtcacagaaaagcatcttacggatggcatgacagtaagagaattatgcagtgctgcaataaccatgagtgataacactgcggccaacttacttctgacaacgatcggaggaccgaaggagctaaccgcttttttgcacaacatgggggatcatgtaactcgccttgatcgttgggaaccggagctgaatgaagccataccaaacgacgagcgtgacaccacgatgcctgcagcaatggcaacaacgttgcgcaaactattaactggcgaactacttactctagcttcccggcaacaattaatagactggatggaggcggataaagttgcaggaccacttctgcgctcggcccttccggctagctggtttattgctgataaatctggagccggtgagcgtgggtctcgcggtatcattgcagcactggggccagatggtaagccctcccgtatcgtagttatctacacgacggggagtcaggcaactatggatgaacgaaatagacagatcgctgagataggtgcctcactgattaagcattggtaactgcagaccaagtttactcatatatactttagattgatttaaaacttcatttttaatttaaaaggatctaggtgaagatcctttttgataatctcatgaccaaaatcccttaacgtgagttttcgttccactgagcgtcagaccccgtagaaaagatcaaaggatcttcttgagatcctttttttctgcgcgtaatctgctgcttgcaaacaaaaaaaccaccgctaccagcggtggtttgtttgccggatcaagagctaccaactctttttccgaaggtaactggcttcagcagagcgcagataccaaatactgtccttctagtgtagccgtagttaggccaccacttcaagaactctgtagcaccgcctacatacctcgctctgctaatcctgttaccagtggctgctgccagtggcgataagtcgtgtcttaccgggttggactcaagacgatagttaccggataaggcgcagcggtcgggctgaacggggggttcgtgcacacagcccagcttggagcgaacgacctacaccgaactgagatacctacagcgtgagctatgagaaagcgccacgcttcccgaagggagaaaggcggacaggtatccggtaagcggcagggtcggaacaggagagcgcacgagggagcttccagggggaaacgcctggtatctttatagtcctgtcgggtttcgccacctctgacttgagcgtcgatttttgtgatgctcgtcaggggggcggagcctatggaaaaacgccagcaacgcggcctttttacggttcctggccttttgctgg

SEQ ID NO: 90 - DNA, 7569 bp, Artificial
  Synthetic
agacttagggaccctgcggccgccattaattcctaatttttgttgacactctatcattgatagagttattttaccactccctatcagtgatagagaaaagtgaaatgaatagaccggccgctgagaaaaagcgaagcggctttcgcaacgctctttaacaaaacagattaccgataagtgtgagtgccttgggcctcgcactgtttgaaagacagacgagatgatgttttgaacattgtcctgtcggtttctttgaagcagaccagaagttaaaaagttagagattgaacataagagtttgatcctggctcagattgaacgctggcggcatgctttacacatgcaagtcggacggcagcacagggaagcttgcttctcgggtggcgagtggcgaacgggtgagtaacatatcggaacgtaccgggtagcgggggataactgatcgaaagatcagctaataccgcatacgtcttgagagggaaagcaggggaccttcgggccttgcgctatccgagcggccgatatctgattagctggttggcggggtaaaggcccaccaaggcgacgatcagtagcgggtctgagaggatgatccgccacactgggactgagacacggcccagactcctacgggaggcagcagtggggaattttggacaatgggcgcaagcctgatccagccatgccgcgtgtctgaagaaggccttcgggttgtaaaggacttttgtcagggaagaaaaggccgttgccaatatcggcggccgatgacggtacctgaagaataagcaccggctaactacgtgccagcagccgcggtaatacgtagggtgcgagcgttaatcggaattactgggcgtaaagcgggcgcagacggttacttaagcaggatgtgaaatccccgggctcaacccgggaactgcgttctgaactgggtgactcgagtgtgtcagagggaggtggaattccacgtgtagcagtgaaatgcgtagagatgtggaggaataccgatggcgaaggcagcctcctgggataacactgacgttcatgtccgaaagcgtgggtagcaaacaggattagataccctggtagtccacgccctaaacgatgtcaattagctgttgggcaacttgattgcttggtagcgtagctaacgcgtgaaattgaccgcctggggagtacggtcgcaagattaaaactcaaaggaattgacggggacccgcacaagcggtggatgatgtggattaattcgatgcaacgcgaagaaccttacctggttttgacatgtgcggaatcctccggagacggaggagtgccttcgggagccgtaacacaggtgctgcatggctgtcgtcagctcgtgtcgtgagatgttgggttaagtcccgcaacgagcgcaacccttgtcattagttgccatcattcggttgggcactctaatgagactgccggtgacaagccggaggaaggtggggatgacgtcaagtcctcatggcccttatgaccagggcttcacacgtcatacaatggtcggtacagagggtagccaagccgcgaggcggagccaatctcacaaaaccgatcgtagtccggattgcactctgcaactcgagtgcatgaagtcggaatcgctagtaatcgcaggtcagcatactgcggtgaatacgttcccgggtcttgtacacaccgcccgtcacaccatgggagtgggggataccagaagtaggtagggtaaccgcaaggagtccgcttaccacggtatgcttcatgactggggtgaagtcgtaacaaggtagccgtaggggaacctgcggctggatcatgtggtttctagagaaagaaggggctttaggcattcacacttatcggtaaactgaaaagatgcggaagaagcttgagtgaaggcaaggttcgcttaagaagggaaaccgggtttgtagctcagctggttagagcacacgcttgataagcgtggggtcggaggttcaagtcctcccagacccaccaagaacgggggcatagctcagttggtagagcacctgctttgcaagcagggggtcatcggttcgatcccgtttgcctccaccaaaactttacaaatgaaagcaagtttgctgtttttagcagcttattttgatttgcgaagtagaataacgacgcatcgatctttaacaaattggaaagccgaaatcaacaaacaaagacaatgagtttgttttgattttttattctttgcaaaggataaaaaatctctcgcaagagaaaagaaaacaaacatagtatttgggtgatgattgtatcgacttaatcctgaaacacaaaaggcaggattaagacacaacaaagcagtaagctttatcaaagtagggatttcaagtttgcttacttagtcaacgggtaggtaaacgaagtcaaagaagttcttgaaatgatagagtcaagtgaataagtgcatcaggcggatgccttggcgatgataggcgacgaaggacgtgtaagcctgcgaaaagcgcgggggagctggcaataaagctatgattccgcgatgtccgaatggggaaacccactgcattctgtgcagtatcctaagttgaatacataggcttagagaagcgaacccggagaactgaaccatctaagtacccggaggaaaagaaatcaaccgagattccgcaagtagtggcgagcgaacgcggaggagcctgtacgtaataactgtcgagatagaagaacaagctgggaagcttgaccatagcgggtgacagtcccgtattcgaaatctcaacagcggtactaagcgtacgaaaagtagggcgggacacgtgaaatcctgtctgaatatggggggaccatcctccaaggctaaatactcatcatcgaccgatagtgaaccagtaccgtgagggaaaggcgaaaagaaccccgggaggggagtgaaacagaacctgaaacctgatgcatacaaacagtgggagcgccctagtggtgtgactgcgtaccttttgtataatgggtcaacgacttacattcagtagcgagcttaaccggataggggaggcgtagggaaaccgagtcttaatagggcgatgagttgctgggtgtagacccgaaaccgagtgatctatccatggtcaggttgaaggtgccgtaacaggtactggaggaccgaacccacgcatgttgcaaaatgcggggatgagctgtgggtaggggtgaaaggctaaacaaactcggagatagctggttctccccgaaaactatttaggtagtgcctcgagcaagacactgatgggggtaaagcactgttatggctagggggttattgcaacttaccaacccatggcaaactcagaataccatcaagtggttcctcgggagacagacagcgggtgctaacgtccgttgtcaagagggaaacaacccagaccgccggctaaggtcccaaatgatagattaagtggtaaacgaagtgggaaggcacagacagccaggatgttggcttagaagcagccatcatttaaagaaagcgtaatagctcactggtcgagtcgtcctgcgcggaagatgtaacggggctcaaatctataaccgaagctgcggatgccggtttaccggcatggtaggggagcgttctgtaggctgatgaaggtgcattgtaaagtgtgctggaggtatcagaagtgcgaatgttgacatgagtagcgataaagcgggtgaaaagcccgctcgccgaaagcccaaggtttcctacgcaacgttcatcggcgtagggtaagtcggcccctaaggcgaggcagaaatgcgtagtcgatgggaaacaggttaatattcctgtacttgattcaaatgcgatgtggggacggagaaggttaggttggcaagctgttggaatagcttgtttaagccggtaggtggaagacttaggcaaatccgggttttcttaacaccgagaagtgatgacgagtgtctacggacacgaagcaaccgataccacgcttccaggaaaagccactaagcttcagtttgaatcgaaccgtaccgcaaaccgacacaggtgggcaggatgagaattctaaggcgcttgagagaactcgggagaaggaactcggcaaattgataccgtaacttcgggagaaggtatgccctctaaggttaaggacttgctccgtaagccccggagggtcgcagagaataggtggctgcgactgtttattaaaaacacagcactctgccaacacgaaagtggacgtatagggtgtgacgcctgcccggtgccggaaggttaattgaagatgtgcaagcatcggatcgaagccccggtaaacggcggccgtaactataacggtcctaaggtagcgaaattccttgtcgggtaagttccgacccgcacgaatggcgtaacgatggccacactgtctcctcccgagactcagcgaagttgaagtggttgtgaagatgcaatctacccgctgctagacggaaagaccccgtgaacctttactgtagctttgcattggactttgaagtcacttgtgtaggataggtgggaggcttggaagcagagacgccagtctctgtggagtcgtccttgaaataccaccctggtgtctttgaggttctaacccagacccgtcatccgggtcggggaccgtgcatggtaggcagtttgactggggcggtctcctcccaaagcgtaacggaggagttcgaaggttacctaggtccggtcggaaatcggactgatagtgcaatggcaaaaggtagcttaactgcgagaccgacaagtcgggcaggtgcgaaagcaggacatagtgatccggtggttctgtatggaagggccatcgctcaacggataaaaggtactccggggataacaggctgattccgcccaagagttcatatcgacggcggagtttggcacctcgatgtcggctcatcacatcctggggctgtagtcggtcccaagggtatggctgttcgccatttaaagtggtacgtgagctgggtttaaaacgtcgtgagacagtttggtccctatctgcagtgggcgttggaagtttgacgggggctgctcctagtacgagaggaccggagtggacgaacctctggtgtaccggttgtaacgccagttgcatagccgggtagctaagttcggaagagataagcgctgaaagcatctaagcgcgaaactcgcctgaagatgagacttcccttgcggtttaaccgcactaaagggtcgttcgagaccaggacgttgataggtggggtgtggaagcgcggtaacgcgtgaagctaacccatactaattgcccgtgaggcttgactctatcatttgaaggacttcaagagataaaagcttactgactgattcagtcattaccgaatatattgattaaggctttaccgatttgcaacagtttaagtttggcggccatagcgagttggtcccacgccttcccatcccgaacaggaccgtgaaacgactcagcgccgatgatagtgtggttcttccatgcgaaagtaggtcactgccaaacaccatttcagaaaacccccggatatccgggggtttttgctttgcccggaaaaaatgtcggggatggcgggacggcatctgtacggtgtccggtcgggtttgcggaggaacggcttgaaactttgggatattcattttagaatgacccgttttatagcggattaacaaaaatcaggacaaggcggcgggccgcaggcagtacggatagtacggaaccggttcgcccggtgcttcatcaccttagggaatcgcgcgccgggaaatgtgcgcggaacccctatttgtttatttttctaaatacattcaaatatgtatccgctcatgagacaataaccctgataaatgcttcaataatattgaaaaaggaagagtatgagtattcaacatttccgtgtcgcccttattcccttttttgcggcattttgccttcctgtttttgctcacccagaaacgctggtgaaagtaaaagatgctgaagatcagttgggtgcacgagtgggttacatcgaactggatctcaacagcggtaagatccttgagagttttcgccccgaagaacgttttccaatgatgagcacttttaaagttctgctatgtggcgcggtattatcccgtgttgacgccgggcaagagcaactcggtcgccgcatacactattctcagaatgacttggttgagtactcaccagtcacagaaaagcatcttacggatggcatgacagtaagagaattatgcagtgctgcaataaccatgagtgataacactgcggccaacttacttctgacaacgatcggaggaccgaaggagctaaccgcttttttgcacaacatgggggatcatgtaactcgccttgatcgttgggaaccggagctgaatgaagccataccaaacgacgagcgtgacaccacgatgcctgcagcaatggcaacaacgttgcgcaaactattaactggcgaactacttactctagcttcccggcaacaattaatagactggatggaggcggataaagttgcaggaccacttctgcgctcggcccttccggctagctggtttattgctgataaatctggagccggtgagcgtgggtctcgcggtatcattgcagcactggggccagatggtaagccctcccgtatcgtagttatctacacgacggggagtcaggcaactatggatgaacgaaatagacagatcgctgagataggtgcctcactgattaagcattggtaactgcagaccaagtttactcatatatactttagattgatttaaaacttcatttttaatttaaaaggatctaggtgaagatcctttttgataatctcatgaccaaaatcccttaacgtgagttttcgttccactgagcgtcagaccccgtagaaaagatcaaaggatcttcttgagatcctttttttctgcgcgtaatctgctgcttgcaaacaaaaaaaccaccgctaccagcggtggtttgtttgccggatcaagagctaccaactctttttccgaaggtaactggcttcagcagagcgcagataccaaatactgtccttctagtgtagccgtagttaggccaccacttcaagaactctgtagcaccgcctacatacctcgctctgctaatcctgttaccagtggctgctgccagtggcgataagtcgtgtcttaccgggttggactcaagacgatagttaccggataaggcgcagcggtcgggctgaacggggggttcgtgcacacagcccagcttggagcgaacgacctacaccgaactgagatacctacagcgtgagctatgagaaagcgccacgcttcccgaagggagaaaggcggacaggtatccggtaagcggcagggtcggaacaggagagcgcacgagggagcttccagggggaaacgcctggtatctttatagtcctgtcgggtttcgccacctctgacttgagcgtcgatttttgtgatgctcgtcaggggggcggagcctatggaaaaacgccagcaacgcggcctttttacggttcctggccttttgctgg

SEQ ID NO: 91 - DNA, 7481 bp, Artificial
  Synthetic
agacttagggaccctgcggccgccattaattcctaatttttgttgacactctatcattgatagagttattttaccactccctatcagtgatagagaaaagtgaaatgaatagaccggccgctgagaaaaagcgaagcggctgtggacgtgtcgagtctttccaagcattggtttgatcaggcttgaatacgtaaacagttcaggaatgaacgcaaacgtttatttatttgagtttggtctatgtgaccaatgccgggattaagtaatacaaagaatcaaattcttcggagagtttgatcctggctcagaacgaacgctggcggcgtgcctaacacatgcaagtcgaacggactttaagacttcggttttaaagttagtggcgcacgggtgagtaacgcgtggatatctgcctatcagtgggggacaactacaggaaactgtagctaataccgcatacgctgtacgcaggaaagcgggggatcttcggacctcgcgctgatagatgagtccgcgtctgattagctagttggtggggtaaaggcctaccaaggcgatgatcagtaactggtttgagaggatgatcagtcacactggaactgagacacggtccagactcctacgggaggcagcagtggggaatattgcacaatgggggaaaccctgatgcagcgacgccgcgtgcgggaagaaggccttcgggttgtaaaccgctttcaattgggaagaagagatgagtactaatactgctctgatttgacggtacctttagaagaagcaccggctaatttcgtgccagcagccgcggtaatacgaaaggtgcaagcgttgttcggatttactgggcgtaaagagatcgtaggtggtttgttaagtcggatgtgaaatcccagggctcaaccctggaactgcattcgatactggcagactagagtttgggaggggtaagcggaattccgtgtgtagcagtgaaatgcgtagatatacggaggaacacctgaggcgaaggcggcttactggaccaatactgacactgaggatcgaaagcgtgggtagcaaacaggattagataccctggtagtccacgccctaaacgatgtcaactagccgtagcgggtatcgacccctgctgtggcgaagctaacgcgataagttgaccgcctggggagtacggtcgcaagattaaaactcaaaggaattgacgggggcccgcacaagcggtggagcatgtggtttaattcgacgcaacgcgaagaaccttacctgggtttgacatcctaagaatactttagagatagagtagtgccttcgggagcttagagacaggtgctgcatggctgtcgtcagctcgtgtcgtgagatgttgggttaagtcccgcaacgagcgcaacccctatcgttagttgccatcatttagttgggcactctagcgagactgccggtgacaaaccggaggaaggtggggacgacgtcaagtcatcatggcccttatgtccagggctacacacgtgctacaatggcgactacaacaagttgcgaacccgcgagggggagccaatcttataaaagtcgtctcagttcggattggagtctgcaactcgactccatgaagttggaatcgctagtaatcgcggatcagcatgccgcggtgaatacgttcccgggccttgtacacaccgcccgtcacaccatgggaattggttgcaccagaagccgccgggctaaccttcgggaggcaggcgtctacggtgtggtcggtaactggggtgaagtcgtaacaaggtatccctaccggaaggtggggatggatcacctccttttagggaatatatcccaaggtcgagattcggcgcgttcacagttcagatagaaatcactagagaagcagcaaagaggaagctctttgttgcttttcataatgacaacgggcccgtagctcagttggttagagcgcacgcctgataagcgtgaggtcggtggttcgaatccacccgggcccaccatatccggtagccagaccaggtgaaacacgggttgaggatagttaagtctaaccgtccatactgggggattagctcagctgggagagcgcctgccttgcacgcaggaggtcagcggttcgatcccgctatcctccaccagttttggtgtaaccgaaaacagttgttgttctttacaagttggtattttgtgataattaaacagatagaggttagttctctctatttgttaagatttgatgcgttggggattcgctctccaacgaagagcatcagatcaaacacgcaatgttttaacgttgcattggttaagtgaataagggtccatgggggatgccttggcgctgagcggcgatgaaagacgtgactacctgcgaaaagtttcggggagctggtaagtgagctttgatccggaaatatctgaatggggaaacccggcagtttcgactgtcacctgcagctgaatacataggctgtatggagcgaacgcggagaattgaaacatcttagtacccgcaggaaaagaaatctatgagattccctgagtagcggcgagcgaaacgggaaaaggccaaaccggtaaatttatttgccggggttgtaggactacaatatggtattgataagagatagcagaacactctggaaagtgtggccatagtgggtgatagccccgtatgcgaaatttcgagtcaacctagtagcatcctgagtaggacgggacacgagaaaccttgtctgaatccggggggaccaccctccaagcctaaatacgtctcagcgaccgatagtgaaccagtaccgtgagggaaaggtgaaaagtaccccgttgaggggagtgaaatagacctgaaaccatggacctacaagcagttggagccctatgtcttcggacagggtgacagcgtaccttttgtataatgggccaacgacttatggctcagtggcaaggttaagttattaaacgaagccgtagcgaaagcgagtcttaatagggcgcacatagtcactgggcatagacccgaagccaggcgagctatttatgagcaggttgaagcggtggtaagacatcgtggaggaccgaacccacattggctgaagacaatggggatgacttgtgaataggggtgaaaggccaatcaagcctggcaatagctggttctctccgaaagctatttaggtagcgcctcatgtatcaccaccgggggtagagcactggatgggctagggggtctcacgacttaccaaacctaaccaaactccgaataccggtgagtgcaatcatgggagacagactttggatgctaacgtccatggtcaagagggaaacaacccagaccgtcagctaaggtccccaaatgtatgttaagtggtaaacgaagtggaaaggcaataacagccaggaggttagcttagaagcagctatcctttaaagaaagcgtaatagctcactggtcgagtcggtctgcgcggaagatataacggggctcaaacatactaccgaagctacgggtgcagtttactgcacggtaggagagcgttctgtaagcctgtgaagcgatactgtaaggagtcgtggaggtatcagaagtgagaatgttggcataagtagcgataaaacgggtgaaaaacccgttcaccgaaagcccaaggtttcctgcaccatgctaatcagggcagggttagtcggcccctaaggcgaggcagaaatgcgtagtcgatgggaaacaggttaatattcctgtaccgactttagatgcgatggagggacggagaaaggtagctgatccgggcgatggttgtcccggttcaagcgcgtagggagagagttttggcaaatccggactctcattatcctgagacgttatgacgtgctcttacttcggtttgagcgaagtcagtgatcctatgcttccaagaaaatcttctaagcttcagtctaaagttgaccgtaccgtaaaccgacacaggtaggcgaggcgagaagcctaaggtgcttgagataactctggttaaggaactcggcaaattggccccgtaacttcgggagaaggggtgccctttttatgtgaagcgacttgctcgtggagcagaagggggttgcagtgaccagggggtagcgactgtttactaaaaacacagcactctgctaagccgtaaggcgatgtatagggtgtgacgcctgcccggtgctggaaggttaagaggtggggttagcgcaagcgaagctctgaatcgaagccccagtaaacggcggccgtaactataacggtcctaaggtagcgaaattccttgtcgggtaagttccgacctgcacgaatggcgtaacgacttccccactgtctcaaccagagactcagcgaaattgaactcgcagtgaagatgctgcgttcccgcggctagacggaaagaccccgtgcacctttactacagcttgacattggatctaggtatattttgtgcaggataggtgggaggctttgatatggtgacgccagttaccatggagccacccttgagataccaccctgaatatgcttgggttctaaccaaggcccgttatccgggtttgggacattgtctggtgggtagtttgactggggcggtcgcctcctaaagagtaacggaggcgcgcgaagtttcactcaggttggtcggaaatcaaccattgagcgcaagagtataagtgagactgactgcgagactgacaagtcgagcagggacgaaagtcggttctagtgatccggtggttccgagtggaagggccatcgctcaacggataaaaggtacgccggggataacaggctgattccccccaagagttcatatcgacgggggagtttggcacctcgatgtcggctcatcacatcctggggctggagcaggtcccaagggttcggctgttcgccgattaaagtggtacgtgagctgggtttagaacgtcgtgagacagttcggtccctatctaccgtgggcgttggagaattgagaggatctgtccttagtacgagaggaccgggatggacaaacctctggtgttcctgttgttctgccaagagcattgcagggtagctacgtttggaacggataaccgctgaaggcatctaagcgggaagccggcctcaagataaattctcccggagctttaagctccctgaagggccgtggaagactaccacgttgataggctgggtgtggaagtgcagcaatgcatggagctgaccagtactaattgcccgtgcggcttaaccatgcaacgttaagacattgagtgtttgaattatcacaaaatagccagctatggttggaccttaatggttcagcccaccagtttcctggtgttcatagcaaagaggaaacgcctgatcccatcccgaactcagaagctaagctcttttgcgccaatggtactgtagcgttcgttacgggagagtaggtcaatgccaggaatttatcacaaaaaccgccagtcgagcttcatgctcctggcggttttttttcgtttgtgcagaacaagaggggttctatcgcgctgcggattaatgccgcagcttgcttatcgcgcagcgggacagcgccgcttgctcctgtgttttttcttttacttcacatgtaaacatctagagtaaaaactcggagtgctaaacgatgcgtgatatcaacctggaaaccagacatctgatcaagttggcctcttcgcgcgccgggaaatgtgcgcggaacccctatttgtttatttttctaaatacattcaaatatgtatccgctcatgagacaataaccctgataaatgcttcaataatattgaaaaaggaagagtatgagtattcaacatttccgtgtcgcccttattcccttttttgcggcattttgccttcctgtttttgctcacccagaaacgctggtgaaagtaaaagatgctgaagatcagttgggtgcacgagtgggttacatcgaactggatctcaacagcggtaagatccttgagagttttcgccccgaagaacgttttccaatgatgagcacttttaaagttctgctatgtggcgcggtattatcccgtgttgacgccgggcaagagcaactcggtcgccgcatacactattctcagaatgacttggttgagtactcaccagtcacagaaaagcatcttacggatggcatgacagtaagagaattatgcagtgctgcaataaccatgagtgataacactgcggccaacttacttctgacaacgatcggaggaccgaaggagctaaccgcttttttgcacaacatgggggatcatgtaactcgccttgatcgttgggaaccggagctgaatgaagccataccaaacgacgagcgtgacaccacgatgcctgcagcaatggcaacaacgttgcgcaaactattaactggcgaactacttactctagcttcccggcaacaattaatagactggatggaggcggataaagttgcaggaccacttctgcgctcggcccttccggctagctggtttattgctgataaatctggagccggtgagcgtgggtctcgcggtatcattgcagcactggggccagatggtaagccctcccgtatcgtagttatctacacgacggggagtcaggcaactatggatgaacgaaatagacagatcgctgagataggtgcctcactgattaagcattggtaactgcagaccaagtttactcatatatactttagattgatttaaaacttcatttttaatttaaaaggatctaggtgaagatcctttttgataatctcatgaccaaaatcccttaacgtgagttttcgttccactgagcgtcagaccccgtagaaaagatcaaaggatcttcttgagatcctttttttctgcgcgtaatctgctgcttgcaaacaaaaaaaccaccgctaccagcggtggtttgtttgccggatcaagagctaccaactctttttccgaaggtaactggcttcagcagagcgcagataccaaatactgtccttctagtgtagccgtagttaggccaccacttcaagaactctgtagcaccgcctacatacctcgctctgctaatcctgttaccagtggctgctgccagtggcgataagtcgtgtcttaccgggttggactcaagacgatagttaccggataaggcgcagcggtcgggctgaacggggggttcgtgcacacagcccagcttggagcgaacgacctacaccgaactgagatacctacagcgtgagctatgagaaagcgccacgcttcccgaagggagaaaggcggacaggtatccggtaagcggcagggtcggaacaggagagcgcacgagggagcttccagggggaaacgcctggtatctttatagtcctgtcgggtttcgccacctctgacttgagcgtcgatttttgtgatgctcgtcaggggggcggagcctatggaaaaacgccagcaacgcggcctttttacggttcctggccttttgctgg

SEQ ID NO: 92 - DNA, 7450 bp, Artificial
  Synthetic
agacttagggaccctgcggccgccattaattcctaatttttgttgacactctatcattgatagagttattttaccactccctatcagtgatagagaaaagtgaaatgaatagaccggccgctgagaaaaagcgaagcggcactgctctttaacaatttatcagacaatctgtgtgggcactcgaagatacggattcttaacgtcgcaagacgaaaaatgaataccaagtctcaagagtgaacacgtaattcattacgaagtttaattctttgagcgtcaaacttttggagagtttgatcctggctcagaacgaacgctggcggcgtgcctaacacatgcaagtcgaacggactttaagacttcggttttaaagttagtggcgcacgggtgagtaacgcgtggatatctgcctatcagtgggggacaactacaggaaactgtagctaataccgcatacgctgtacgcaggaaagcgggggatcttcggacctcgcgctgatagatgagtccgcgtctgattagctagttggtggggtaaaggcctaccaaggcgatgatcagtaactggtttgagaggatgatcagtcacactggaactgagacacggtccagactcctacgggaggcagcagtggggaatattgcacaatgggggaaaccctgatgcagcgacgccgcgtgcgggaagaaggccttcgggttgtaaaccgctttcaattgggaagaagagatgagtactaatactgctctgatttgacggtacctttagaagaagcaccggctaatttcgtgccagcagccgcggtaatacgaaaggtgcaagcgttgttcggatttactgggcgtaaagagatcgtaggtggtttgttaagtcggatgtgaaatcccagggctcaaccctggaactgcattcgatactggcagactagagtttgggaggggtaagcggaattccgtgtgtagcagtgaaatgcgtagatatacggaggaacacctgaggcgaaggcggcttactggaccaatactgacactgaggatcgaaagcgtgggtagcaaacaggattagataccctggtagtccacgccctaaacgatgtcaactagccgtagcgggtatcgacccctgctgtggcgaagctaacgcgataagttgaccgcctggggagtacggtcgcaagattaaaactcaaaggaattgacgggggcccgcacaagcggtggagcatgtggtttaattcgacgcaacgcgaagaaccttacctgggtttgacatcctaagaatactttagagatagagtagtgccttcgggagcttagagacaggtgctgcatggctgtcgtcagctcgtgtcgtgagatgttgggttaagtcccgcaacgagcgcaacccctatcgttagttgccatcatttagttgggcactctagcgagactgccggtgacaaaccggaggaaggtggggacgacgtcaagtcatcatggcccttatgtccagggctacacacgtgctacaatggcgactacaacaagttgcgaacccgcgagggggagccaatcttataaaagtcgtctcagttcggattggagtctgcaactcgactccatgaagttggaatcgctagtaatcgcggatcagcatgccgcggtgaatacgttcccgggccttgtacacaccgcccgtcacaccatgggaattggttgcaccagaagccgccgggctaaccttcgggaggcaggcgtctacggtgtggtcggtaactggggtgaagtcgtaacaaggtatccctaccggaaggtggggatggatcacctcctttccttaaagaagcgtactttgtagtgctcacacagattgtctgatagaaagtgaaaagcaaggcgtttacgcgttgggagtgaggctgaagagaataaggccgttcgctttctattaatgaaagctcaccctacacgaaaatatcacgcaacgcgtgataagcaattttcgtgtccccttcgtctagaggcccaggacaccgccctttcacggcggtaacaggggttcgaatcccctaggggacgccacttgctggtttgtgagtgaaagtcgccgaccttaatatctcaaaactcatcttcgggtgatgtttgagatatttgctctttaaaaatctggatcaagctgaaaattgaaacactgaacaacgagagttgttcgtgagtctctcaaattttcgcaacacgatgatgaatcgaaagaaacatcttcgggttgtgaggttaagtgaataagggtccatgggggatgccttggcgctgagcggcgatgaaagacgtgactacctgcgaaaagtttcggggagctggtaagtgagctttgatccggaaatatctgaatggggaaacccggcagtttcgactgtcacctgcagctgaatacataggctgtatggagcgaacgcggagaattgaaacatcttagtacccgcaggaaaagaaatctatgagattccctgagtagcggcgagcgaaacgggaaaaggccaaaccggtaaatttatttgccggggttgtaggactacaatatggtattgataagagatagcagaacactctggaaagtgtggccatagtgggtgatagccccgtatgcgaaatttcgagtcaacctagtagcatcctgagtaggacgggacacgagaaaccttgtctgaatccggggggaccaccctccaagcctaaatacgtctcagcgaccgatagtgaaccagtaccgtgagggaaaggtgaaaagtaccccgttgaggggagtgaaatagacctgaaaccatggacctacaagcagttggagccctatgtcttcggacagggtgacagcgtaccttttgtataatgggccaacgacttatggctcagtggcaaggttaagttattaaacgaagccgtagcgaaagcgagtcttaatagggcgcacatagtcactgggcatagacccgaagccaggcgagctatttatgagcaggttgaagcggtggtaagacatcgtggaggaccgaacccacattggctgaagacaatggggatgacttgtgaataggggtgaaaggccaatcaagcctggcaatagctggttctctccgaaagctatttaggtagcgcctcatgtatcaccaccgggggtagagcactggatgggctagggggtctcacgacttaccaaacctaaccaaactccgaataccggtgagtgcaatcatgggagacagactttggatgctaacgtccatggtcaagagggaaacaacccagaccgtcagctaaggtccccaaatgtatgttaagtggtaaacgaagtggaaaggcaataacagccaggaggttagcttagaagcagctatcctttaaagaaagcgtaatagctcactggtcgagtcggtctgcgcggaagatataacggggctcaaacatactaccgaagctacgggtgcagtttactgcacggtaggagagcgttctgtaagcctgtgaagcgatactgtaaggagtcgtggaggtatcagaagtgagaatgttggcataagtagcgataaaacgggtgaaaaacccgttcaccgaaagcccaaggtttcctgcaccatgctaatcagggcagggttagtcggcccctaaggcgaggcagaaatgcgtagtcgatgggaaacaggttaatattcctgtaccgactttagatgcgatggagggacggagaaaggtagctgatccgggcgatggttgtcccggttcaagcgcgtagggagagagttttggcaaatccggactctcattatcctgagacgttatgacgtgctcttacttcggtttgagcgaagtcagtgatcctatgcttccaagaaaatcttctaagcttcagtctaaagttgaccgtaccgtaaaccgacacaggtaggcgaggcgagaagcctaaggtgcttgagataactctggttaaggaactcggcaaattggccccgtaacttcgggagaaggggtgccctttttatgtgaagcgacttgctcgtggagcagaagggggttgcagtgaccagggggtagcgactgtttactaaaaacacagcactctgctaagccgtaaggcgatgtatagggtgtgacgcctgcccggtgctggaaggttaagaggtggggttagcgcaagcgaagctctgaatcgaagccccagtaaacggcggccgtaactataacggtcctaaggtagcgaaattccttgtcgggtaagttccgacctgcacgaatggcgtaacgacttccccactgtctcaaccagagactcagcgaaattgaactcgcagtgaagatgctgcgttcccgcggctagacggaaagaccccgtgcacctttactacagcttgacattggatctaggtatattttgtgcaggataggtgggaggctttgatatggtgacgccagttaccatggagccacccttgagataccaccctgaatatgcttgggttctaaccaaggcccgttatccgggtttgggacattgtctggtgggtagtttgactggggcggtcgcctcctaaagagtaacggaggcgcgcgaagtttcactcaggttggtcggaaatcaaccattgagcgcaagagtataagtgagactgactgcgagactgacaagtcgagcagggacgaaagtcggttctagtgatccggtggttccgagtggaagggccatcgctcaacggataaaaggtacgccggggataacaggctgattccccccaagagttcatatcgacgggggagtttggcacctcgatgtcggctcatcacatcctggggctggagcaggtcccaagggttcggctgttcgccgattaaagtggtacgtgagctgggtttagaacgtcgtgagacagttcggtccctatctaccgtgggcgttggagaattgagaggatctgtccttagtacgagaggaccgggatggacaaacctctggtgttcctgttgttctgccaagagcattgcagggtagctacgtttggaacggataaccgctgaaggcatctaagcgggaagccggcctcaagataaattctcccggagctttaagctccctgaagggccgtggaagactaccacgttgataggctgggtgtggaagtgcagcaatgcatggagctgaccagtactaattgcccgtgcggcttaaccatacaacgccgaagctgttttggcggatgagagaagattttcagcctgatacagattaaatcagaacgcagaagcggtctgataaaacagaatttttcctggtgttcatagcaaagaggaaacgcctgatcccatcccgaactcagaagctaagctcttttgcgccaatggtactgtagcgttcgttacgggagagtaggtcaatgccaggaatcaaataaaacgaaaggctcagtcgaaagactgggcctttcgttttatctgttgtttgtcggtgaacgctctcctgagtaggacaaatccgccgggagcggatttgaacgttgcgaagcaacggcccggagggtggcgggcaggacgcccgccataaactgccaggcatcaaattaagcagaaggccatcctgacggatggcctttttgcgtttctacaaactcttcctgtcgtcatatctacaagccggcgcgccgggaaatgtgcgcggaacccctatttgtttatttttctaaatacattcaaatatgtatccgctcatgagacaataaccctgataaatgcttcaataatattgaaaaaggaagagtatgagtattcaacatttccgtgtcgcccttattcccttttttgcggcattttgccttcctgtttttgctcacccagaaacgctggtgaaagtaaaagatgctgaagatcagttgggtgcacgagtgggttacatcgaactggatctcaacagcggtaagatccttgagagttttcgccccgaagaacgttttccaatgatgagcacttttaaagttctgctatgtggcgcggtattatcccgtgttgacgccgggcaagagcaactcggtcgccgcatacactattctcagaatgacttggttgagtactcaccagtcacagaaaagcatcttacggatggcatgacagtaagagaattatgcagtgctgcaataaccatgagtgataacactgcggccaacttacttctgacaacgatcggaggaccgaaggagctaaccgcttttttgcacaacatgggggatcatgtaactcgccttgatcgttgggaaccggagctgaatgaagccataccaaacgacgagcgtgacaccacgatgcctgcagcaatggcaacaacgttgcgcaaactattaactggcgaactacttactctagcttcccggcaacaattaatagactggatggaggcggataaagttgcaggaccacttctgcgctcggcccttccggctagctggtttattgctgataaatctggagccggtgagcgtgggtctcgcggtatcattgcagcactggggccagatggtaagccctcccgtatcgtagttatctacacgacggggagtcaggcaactatggatgaacgaaatagacagatcgctgagataggtgcctcactgattaagcattggtaactgcagaccaagtttactcatatatactttagattgatttaaaacttcatttttaatttaaaaggatctaggtgaagatcctttttgataatctcatgaccaaaatcccttaacgtgagttttcgttccactgagcgtcagaccccgtagaaaagatcaaaggatcttcttgagatcctttttttctgcgcgtaatctgctgcttgcaaacaaaaaaaccaccgctaccagcggtggtttgtttgccggatcaagagctaccaactctttttccgaaggtaactggcttcagcagagcgcagataccaaatactgtccttctagtgtagccgtagttaggccaccacttcaagaactctgtagcaccgcctacatacctcgctctgctaatcctgttaccagtggctgctgccagtggcgataagtcgtgtcttaccgggttggactcaagacgatagttaccggataaggcgcagcggtcgggctgaacggggggttcgtgcacacagcccagcttggagcgaacgacctacaccgaactgagatacctacagcgtgagctatgagaaagcgccacgcttcccgaagggagaaaggcggacaggtatccggtaagcggcagggtcggaacaggagagcgcacgagggagcttccagggggaaacgcctggtatctttatagtcctgtcgggtttcgccacctctgacttgagcgtcgatttttgtgatgctcgtcaggggggcggagcctatggaaaaacgccagcaacgcggcctttttacggttcctggccttttgctgg

SEQ ID NO: 93 - DNA, 7481 bp, Artificial
  Synthetic
agacttagggaccctgcggccgccattaattcctaatttttgttgacactctatcattgatagagttattttaccactccctatcagtgatagagaaaagtgaaatgaatagaccggccgctgagaaaaagcgaagcggctgtggacgtgtcgagtctttccaagcattggtttgatcaggcttgaatacgtaaacagttcaggaatgaacgcaaacgtttatttatttgagtttggtctatgtgaccaatgccgggattaagtaatacaaagaatcaaattcttcggagagtttgatcctggctcagaacgaacgctggcggcgtgcctaacacatgcaagtcgaacggactttaagacttcggttttaaagttagtggcgcacgggtgagtaacgcgtggatatctgcctatcagtgggggacaactacaggaaactgtagctaataccgcatacgctgtacgcaggaaagcgggggatcttcggacctcgcgctgatagatgagtccgcgtctgattagctagttggtggggtaaaggcctaccaaggcgatgatcagtaactggtttgagaggatgatcagtcacactggaactgagacacggtccagactcctacgggaggcagcagtggggaatattgcacaatgggggaaaccctgatgcagcgacgccgcgtgcgggaagaaggccttcgggttgtaaaccgctttcaattgggaagaagagatgagtactaatactgctctgatttgacggtacctttagaagaagcaccggctaatttcgtgccagcagccgcggtaatacgaaaggtgcaagcgttgttcggatttactgggcgtaaagagatcgtaggtggtttgttaagtcggatgtgaaatcccagggctcaaccctggaactgcattcgatactggcagactagagtttgggaggggtaagcggaattccgtgtgtagcagtgaaatgcgtagatatacggaggaacacctgaggcgaaggcggcttactggaccaatactgacactgaggatcgaaagcgtgggtagcaaacaggattagataccctggtagtccacgccctaaacgatgtcaactagccgtagcgggtatcgacccctgctgtggcgaagctaacgcgataagttgaccgcctggggagtacggtcgcaagattaaaactcaaaggaattgacgggggcccgcacaagcggtggagcatgtggtttaattcgacgcaacgcgaagaaccttacctgggtttgacatcctaagaatactttagagatagagtagtgccttcgggagcttagagacaggtgctgcatggctgtcgtcagctcgtgtcgtgagatgttgggttaagtcccgcaacgagcgcaacccctatcgttagttgccatcatttagttgggcactctagcgagactgccggtgacaaaccggaggaaggtggggacgacgtcaagtcatcatggcccttatgtccagggctacacacgtgctacaatggcgactacaacaagttgcgaacccgcgagggggagccaatcttataaaagtcgtctcagttcggattggagtctgcaactcgactccatgaagttggaatcgctagtaatcgcggatcagcatgccgcggtgaatacgttcccgggccttgtacacaccgcccgtcacaccatgggaattggttgcaccagaagccgccgggctaaccttcgggaggcaggcgtctacggtgtggtcggtaactggggtgaagtcgtaacaaggtatccctaccggaaggtggggatggatcatgtggttttagggaatatatcccaaggtcgagattcggcgcgttcacagttcagatagaaatcactagagaagcagcaaagaggaagctctttgttgcttttcataatgacaacgggcccgtagctcagttggttagagcgcacgcctgataagcgtgaggtcggtggttcgaatccacccgggcccaccatatccggtagccagaccaggtgaaacacgggttgaggatagttaagtctaaccgtccatactgggggattagctcagctgggagagcgcctgccttgcacgcaggaggtcagcggttcgatcccgctatcctccaccagttttggtgtaaccgaaaacagttgttgttctttacaagttggtattttgtgataattaaacagatagaggttagttctctctatttgttaagatttgatgcgttggggattcgctctccaacgaagagcatcagatcaaacacgcaatgttttaacgttgcattggttaagtgaataagggtccatgggggatgccttggcgctgagcggcgatgaaagacgtgactacctgcgaaaagtttcggggagctggtaagtgagctttgatccggaaatatctgaatggggaaacccggcagtttcgactgtcacctgcagctgaatacataggctgtatggagcgaacgcggagaattgaaacatcttagtacccgcaggaaaagaaatctatgagattccctgagtagcggcgagcgaaacgggaaaaggccaaaccggtaaatttatttgccggggttgtaggactacaatatggtattgataagagatagcagaacactctggaaagtgtggccatagtgggtgatagccccgtatgcgaaatttcgagtcaacctagtagcatcctgagtaggacgggacacgagaaaccttgtctgaatccggggggaccaccctccaagcctaaatacgtctcagcgaccgatagtgaaccagtaccgtgagggaaaggtgaaaagtaccccgttgaggggagtgaaatagacctgaaaccatggacctacaagcagttggagccctatgtcttcggacagggtgacagcgtaccttttgtataatgggccaacgacttatggctcagtggcaaggttaagttattaaacgaagccgtagcgaaagcgagtcttaatagggcgcacatagtcactgggcatagacccgaagccaggcgagctatttatgagcaggttgaagcggtggtaagacatcgtggaggaccgaacccacattggctgaagacaatggggatgacttgtgaataggggtgaaaggccaatcaagcctggcaatagctggttctctccgaaagctatttaggtagcgcctcatgtatcaccaccgggggtagagcactggatgggctagggggtctcacgacttaccaaacctaaccaaactccgaataccggtgagtgcaatcatgggagacagactttggatgctaacgtccatggtcaagagggaaacaacccagaccgtcagctaaggtccccaaatgtatgttaagtggtaaacgaagtggaaaggcaataacagccaggaggttagcttagaagcagctatcctttaaagaaagcgtaatagctcactggtcgagtcggtctgcgcggaagatataacggggctcaaacatactaccgaagctacgggtgcagtttactgcacggtaggagagcgttctgtaagcctgtgaagcgatactgtaaggagtcgtggaggtatcagaagtgagaatgttggcataagtagcgataaaacgggtgaaaaacccgttcaccgaaagcccaaggtttcctgcaccatgctaatcagggcagggttagtcggcccctaaggcgaggcagaaatgcgtagtcgatgggaaacaggttaatattcctgtaccgactttagatgcgatggagggacggagaaaggtagctgatccgggcgatggttgtcccggttcaagcgcgtagggagagagttttggcaaatccggactctcattatcctgagacgttatgacgtgctcttacttcggtttgagcgaagtcagtgatcctatgcttccaagaaaatcttctaagcttcagtctaaagttgaccgtaccgtaaaccgacacaggtaggcgaggcgagaagcctaaggtgcttgagataactctggttaaggaactcggcaaattggccccgtaacttcgggagaaggggtgccctttttatgtgaagcgacttgctcgtggagcagaagggggttgcagtgaccagggggtagcgactgtttactaaaaacacagcactctgctaagccgtaaggcgatgtatagggtgtgacgcctgcccggtgctggaaggttaagaggtggggttagcgcaagcgaagctctgaatcgaagccccagtaaacggcggccgtaactataacggtcctaaggtagcgaaattccttgtcgggtaagttccgacctgcacgaatggcgtaacgacttccccactgtctcaaccagagactcagcgaaattgaactcgcagtgaagatgctgcgttcccgcggctagacggaaagaccccgtgcacctttactacagcttgacattggatctaggtatattttgtgcaggataggtgggaggctttgatatggtgacgccagttaccatggagccacccttgagataccaccctgaatatgcttgggttctaaccaaggcccgttatccgggtttgggacattgtctggtgggtagtttgactggggcggtcgcctcctaaagagtaacggaggcgcgcgaagtttcactcaggttggtcggaaatcaaccattgagcgcaagagtataagtgagactgactgcgagactgacaagtcgagcagggacgaaagtcggttctagtgatccggtggttccgagtggaagggccatcgctcaacggataaaaggtacgccggggataacaggctgattccccccaagagttcatatcgacgggggagtttggcacctcgatgtcggctcatcacatcctggggctggagcaggtcccaagggttcggctgttcgccgattaaagtggtacgtgagctgggtttagaacgtcgtgagacagttcggtccctatctaccgtgggcgttggagaattgagaggatctgtccttagtacgagaggaccgggatggacaaacctctggtgttcctgttgttctgccaagagcattgcagggtagctacgtttggaacggataaccgctgaaggcatctaagcgggaagccggcctcaagataaattctcccggagctttaagctccctgaagggccgtggaagactaccacgttgataggctgggtgtggaagtgcagcaatgcatggagctgaccagtactaattgcccgtgcggcttaaccatgcaacgttaagacattgagtgtttgaattatcacaaaatagccagctatggttggaccttaatggttcagcccaccagtttcctggtgttcatagcaaagaggaaacgcctgatcccatcccgaactcagaagctaagctcttttgcgccaatggtactgtagcgttcgttacgggagagtaggtcaatgccaggaatttatcacaaaaaccgccagtcgagcttcatgctcctggcggttttttttcgtttgtgcagaacaagaggggttctatcgcgctgcggattaatgccgcagcttgcttatcgcgcagcgggacagcgccgcttgctcctgtgttttttcttttacttcacatgtaaacatctagagtaaaaactcggagtgctaaacgatgcgtgatatcaacctggaaaccagacatctgatcaagttggcctcttcgcgcgccgggaaatgtgcgcggaacccctatttgtttatttttctaaatacattcaaatatgtatccgctcatgagacaataaccctgataaatgcttcaataatattgaaaaaggaagagtatgagtattcaacatttccgtgtcgcccttattcccttttttgcggcattttgccttcctgtttttgctcacccagaaacgctggtgaaagtaaaagatgctgaagatcagttgggtgcacgagtgggttacatcgaactggatctcaacagcggtaagatccttgagagttttcgccccgaagaacgttttccaatgatgagcacttttaaagttctgctatgtggcgcggtattatcccgtgttgacgccgggcaagagcaactcggtcgccgcatacactattctcagaatgacttggttgagtactcaccagtcacagaaaagcatcttacggatggcatgacagtaagagaattatgcagtgctgcaataaccatgagtgataacactgcggccaacttacttctgacaacgatcggaggaccgaaggagctaaccgcttttttgcacaacatgggggatcatgtaactcgccttgatcgttgggaaccggagctgaatgaagccataccaaacgacgagcgtgacaccacgatgcctgcagcaatggcaacaacgttgcgcaaactattaactggcgaactacttactctagcttcccggcaacaattaatagactggatggaggcggataaagttgcaggaccacttctgcgctcggcccttccggctagctggtttattgctgataaatctggagccggtgagcgtgggtctcgcggtatcattgcagcactggggccagatggtaagccctcccgtatcgtagttatctacacgacggggagtcaggcaactatggatgaacgaaatagacagatcgctgagataggtgcctcactgattaagcattggtaactgcagaccaagtttactcatatatactttagattgatttaaaacttcatttttaatttaaaaggatctaggtgaagatcctttttgataatctcatgaccaaaatcccttaacgtgagttttcgttccactgagcgtcagaccccgtagaaaagatcaaaggatcttcttgagatcctttttttctgcgcgtaatctgctgcttgcaaacaaaaaaaccaccgctaccagcggtggtttgtttgccggatcaagagctaccaactctttttccgaaggtaactggcttcagcagagcgcagataccaaatactgtccttctagtgtagccgtagttaggccaccacttcaagaactctgtagcaccgcctacatacctcgctctgctaatcctgttaccagtggctgctgccagtggcgataagtcgtgtcttaccgggttggactcaagacgatagttaccggataaggcgcagcggtcgggctgaacggggggttcgtgcacacagcccagcttggagcgaacgacctacaccgaactgagatacctacagcgtgagctatgagaaagcgccacgcttcccgaagggagaaaggcggacaggtatccggtaagcggcagggtcggaacaggagagcgcacgagggagcttccagggggaaacgcctggtatctttatagtcctgtcgggtttcgccacctctgacttgagcgtcgatttttgtgatgctcgtcaggggggcggagcctatggaaaaacgccagcaacgcggcctttttacggttcctggccttttgctgg

SEQ ID NO: 94 - DNA, 7479 bp, Artificial
  Synthetic
agacttagggaccctgcggccgccattaattcctaatttttgttgacactctatcattgatagagttattttaccactccctatcagtgatagagaaaagtgaaatgaatagaccggccgctgagaaaaagcgaagcggcaatgcggtctcttgaagaagacaccattacgccggtctggccttcgggttggatcgagtgatgggaactcgtcaagaaactatgcaaaccagatacctggttctgggttttcccctggaactggaagtctgaagtcaatgtcaactcaacctgagagtttgatcctggctcagagcgaacgctggcggcaggcctaacacatgcaagtcgaacggatccttcgggattagtggcggacgggtgagtaacacgtgggaacgtgccctttggttcggaacaactcagggaaacttgagctaataccggatgtgcccttcgggggaaagatttatcgccattggagcggcccgcgtctgattagctagttggtgaggtaaaggctcaccaaggcgacgatcagtagctggtctgagaggatgatcagccacattgggactgagacacggcccaaactcctacgggaggcagcagtggggaatcttgcgcaatgggcgaaagcctgacgcagccatgccgcgtgaatgatgaaggtcttaggattgtaaaattctttcaccggggacgataatgacggtacccggagaagaagccccggctaacttcgtgccagcagccgcggtaatacgaagggggctagcgttgctcggaattactgggcgtaaagggagcgtaggcggactgtttagtcagaggtgaaagcccagggctcaaccttggaattgcctttgatactggcagtcttgagtacggaagaggtatgtggaactccgagtgtagaggtgaaattcgtagatattcggaagaacaccagtggcgaaggcgacatactggtccgttactgacgctgaggctcgaaagcgtggggagcaaacaggattagataccctggtagtccacgccgtaaacgatgagtgctagttgtcggcatgcatgcatgtcggtgacgcagctaacgcattaagcactccgcctggggagtacggtcgcaagattaaaactcaaaggaattgacgggggcccgcacaagcggtggagcatgtggtttaattcgaagcaacgcgcagaaccttaccaccttttgacatgcctggaccgccacagagatgtggttttcccttcggggactgggacacaggtgctgcatggctgtcgtcagctcgtgtcgtgagatgttgggttaagtcccgcaacgagcgcaaccctcgtgattagttgccatcaggtttggctgggcactctaatcatactgccggagttaatccggaggaaggcggggatgacgtcaagtcctcatggcccttacaaggtgggctacacacgtgctacaatggcgactacagagggctgcaatcccgcgagggggagccaatccctaaaagtcgtctcagttcggattgttctctgcaactcgagagcatgaagttggaatcgctagtaatcgcggatcagcatgccgcggtgaatacgttcccgggccttgtacacaccgcccgtcacaccatgggagttggctttacccgaaggcgctgcgctaaccgcaagggggcaggcgaccacggtagggtcagcgactggggtgaagtcgtaacaaggtagccgtaggggaacctgcggctggatcatgtggtttctaaggatgcttctccagcttctcacgaagctattgaagctccagacacggtcgctagacgaccaaaaatgagcggatcgccgccgtcttcgtttctctttccactcacttggttccgttagggatcaagtcgatcgcgagcccggaggcaaacgcctgcgaaggccgtcataggcctgtagctcaggtggttagagcgtacgcctgataagcgtaaggtcggcagttcgagtctgcccaggcctaccactctttcctctgatgcttcggatcacgaccagctctcctggctaacccagatctcttgtacaagagaggggccatagctcagttggtagagcgcctgctttgcaagcaggatgtcgtcggttcgaatccgtctggctccaccatttttggttcgctgtcctcgctaccgcttcgctgcttgagtgaggtcagctggtagggccgccaagatggatatctcgcgattggaatgacaagtttgcagcagcgcttagcgctgatgcgaaatgacattgtgaaggcagggttctcccgccgaccgcagctcacccctgggatgcggatccggtttaagggcggacttaagaagacatcattgtctgactaaaggtagagctcatgctcaggcctccccgcgcgatgcggcgagggctgatcaagcatgggttttgctgagaacgatcaagcgcataagggcttctgacggatgccttggcattgagaggcgatgaaggacgtggcacgctgcgataagagccggggaggcgcgagcaccctttgatccggctatctccgaatggggaaacccacctttatggtcacccgactttgtttccgcttcggcggagacgacgatcggttgatcagacaaggtataatgacctgaatacatagggttcattaagcaaacccggggaactgaaacatctcagtacccggaggaaaggacatcaaccgagactcccgtagtagtggcgagcgaaccgggaccaggccagtgctgtcgtgacataaagctgaatgtgttgggaaacacagccatagtgggtgatagccccgtaagcgtcaaatagcgacagactcgagtagggcgggacacgtgaaatcctgtctgaacatggggggaccaccctccaagcctaagtactcctcaatgaccgatagcgaacaagtaccgtgagggaaaggtgaaaagcaccccgacaaggggagtgaaacagaacctgaaatcggaagcctacaagcagtcggagccaccgcgcgtggtgacggcgtaccttttgtataatgggtcagcgacttcatgtgccgtgcaagcttaagccgttaggtgtaggcgcagcgaaagcgagtctgaatagggcgaataagtacgtcgcatgacgacccgaaaccaggtgatctatccatgagcaggttgaaggtaaggtaacacttactggaggaccgaaccggtgaatgttgaaaaattctcggatgacttgtggataggggtgaaaggccaatcaaacctggacatagctggttctccgcgaaaactatttaggtagtgcctcggacgaattccttggggggtagagcactgaatggatgcgggcggcgcgagctgtaccaattctaatcaaactccgaatacccaagagaaatatccgggagacacacggcgggtgctaacgtccgtcgtgaaaagggaaacaaccctaaccatcatctaaggcccccaagtactggctaagtgggaaacgatgtgggtttgctttgacaaccaggatgttggcttagaagcagccatcatttaaagaaagcgtaacagctcactggtcaagcgaacctgcgcggaaaatgtaacggggctaaagccagtcgccgaaggtatgggtgtgcactctgtgcacgcggtagcggagcgttccgtaagccgatgaaggtgaggcgtgagccttgctggaggtatcggaagtgagaatgctgacatgagtagcgataaagagggtgagagaccctctcgccgaaagcccaagggttcctgcgtaaagctaatctgcgcagggttagtcggcccctaaggcgaggccgaaaggcgtagtcgatgggaatcaggtgaatattcctgaaccagttggaagtgacggatctggtaaattgtcagggcttattggattgctcctggcagtgaacaggtccctggaaataactccaacggagaccgtacccgaaaccgacacaggtgggcaggtagagtataccaaggcgcttgagagaactatgctgaaggaactcggcaaattgcacgcgtaacttcgggataagcgtgactctcttttgggcaaccagatgagagtggcacaagccagggggtagcgactgtttatcaaaaacacagggctctgcgaagccgcaaggcgacgtatagggtctgacgcctgcccggtgcctgaaggttaaaaggaggggtgcaagctctgaattgaagcccaggtaaacggcggccgtaactataacggtcctaaggtagcgaaattccttgtcgggtaagttccgacctgcacgaatggcgtaacgacttccccactgtctccagcataggctcagcgaaattgaattccccgtgaagatgcggggttcccgcggtcagacggaaagaccctatgaacctttactgcagcttcgccttggcgttagcagcaacatgtgtaggataggtgggaggctatgaaactcgggcgccagttcgagtggagccatccttgaaataccacccttattgttgctgacgtctaaccgcggcccgttatccgggtccgggacatggcgtggcgggcagtttgactggggcggtcgcctcccaaagtgtaacggaggcgcgcgatggtgggctcagaccggtcggaaatcggtcgtcgagtgcaatggcataagcccgcctgactgcgagactgacaagtcgagcagagacgaaagtcggccatagtgatccggtggtcctgcgtggaagggccatcgctcaacgaataaaaggtactctagggataacaggctgattttgcccaagagtccatatcgacggcaaagtttggcacctcgatgtcggctcatcacatcctggggctggagcaggtcccaagggttcggctgttcgccgattaaagtggtacgtgagctgggttcagaacgtcgtgagacagtttggtccctatctgccgtgggtgtacgagacttgagaggatctgtccctagtacgagaggaccgggatggacacacctctggtggacctgtcatggcgccagctgtgcagcagggtagctaagtgtggaatagataaccgctgaaagcatctaagcgggaaactaacctcaaaacaaggtctcgctgagagccgtggaagaccaccacgttgataggccgggtgtggaagtgcggtgacgcatggagcttaccggtactaatagctcgataggcttgatcgttcttcagtcaaacccatgcaaacgcatggctctacttcagacactgatgtcttcttcacaatctccggcctcgaaagaggctggatgatatccttttcgctgacctggtggctatgccgggggttccccacccgatcccattccgaactcggtcgttaagtccccctgggccaatggtacttcgtctcaaggcgcgggagagtaggtcgccgccaggtccgccaaaaggatatcaccaataagtccctcagaaccctccatcacaatcaacaaacaccctgacgcggggtggagcagcccggtagctcgtcaggctcataacctgaaggtcacaggttcaaatcctgtccccgcacccagtggactaagcttaggttcgccccgtccggatccggtcggggttttttgcggtgcaatatcgcaacctatagcggcattttcgcaacgcgcgccgggaaatgtgcgcggaacccctatttgtttatttttctaaatacattcaaatatgtatccgctcatgagacaataaccctgataaatgcttcaataatattgaaaaaggaagagtatgagtattcaacatttccgtgtcgcccttattcccttttttgcggcattttgccttcctgtttttgctcacccagaaacgctggtgaaagtaaaagatgctgaagatcagttgggtgcacgagtgggttacatcgaactggatctcaacagcggtaagatccttgagagttttcgccccgaagaacgttttccaatgatgagcacttttaaagttctgctatgtggcgcggtattatcccgtgttgacgccgggcaagagcaactcggtcgccgcatacactattctcagaatgacttggttgagtactcaccagtcacagaaaagcatcttacggatggcatgacagtaagagaattatgcagtgctgcaataaccatgagtgataacactgcggccaacttacttctgacaacgatcggaggaccgaaggagctaaccgcttttttgcacaacatgggggatcatgtaactcgccttgatcgttgggaaccggagctgaatgaagccataccaaacgacgagcgtgacaccacgatgcctgcagcaatggcaacaacgttgcgcaaactattaactggcgaactacttactctagcttcccggcaacaattaatagactggatggaggcggataaagttgcaggaccacttctgcgctcggcccttccggctagctggtttattgctgataaatctggagccggtgagcgtgggtctcgcggtatcattgcagcactggggccagatggtaagccctcccgtatcgtagttatctacacgacggggagtcaggcaactatggatgaacgaaatagacagatcgctgagataggtgcctcactgattaagcattggtaactgcagaccaagtttactcatatatactttagattgatttaaaacttcatttttaatttaaaaggatctaggtgaagatcctttttgataatctcatgaccaaaatcccttaacgtgagttttcgttccactgagcgtcagaccccgtagaaaagatcaaaggatcttcttgagatcctttttttctgcgcgtaatctgctgcttgcaaacaaaaaaaccaccgctaccagcggtggtttgtttgccggatcaagagctaccaactctttttccgaaggtaactggcttcagcagagcgcagataccaaatactgtccttctagtgtagccgtagttaggccaccacttcaagaactctgtagcaccgcctacatacctcgctctgctaatcctgttaccagtggctgctgccagtggcgataagtcgtgtcttaccgggttggactcaagacgatagttaccggataaggcgcagcggtcgggctgaacggggggttcgtgcacacagcccagcttggagcgaacgacctacaccgaactgagatacctacagcgtgagctatgagaaagcgccacgcttcccgaagggagaaaggcggacaggtatccggtaagcggcagggtcggaacaggagagcgcacgagggagcttccagggggaaacgcctggtatctttatagtcctgtcgggtttcgccacctctgacttgagcgtcgatttttgtgatgctcgtcaggggggcggagcctatggaaaaacgccagcaacgcggcctttttacggttcctggccttttgctgg

SEQ ID NO: 95 - DNA, 7630 bp, Artificial
  Synthetic
agacttagggaccctgcggccgccattaattcctaatttttgttgacactctatcattgatagagttattttaccactccctatcagtgatagagaaaagtgaaatgaatagaccggccgctgagaaaaagcgaagcggcacgaaagacttcggcggtacacgttttcaaggaaacaccatgttcgcgagcgctgtgaagcgctgcgacgaaccgacgatcttcggattgttggtgatggtgggacctcgtcaaacgttgtgatcagccggttcaaagttcaagtccaacttgagagtttgatcctggctcagagcgaacgctggcggcaggcttaacacatgcaagtcgaacgggcgtagcaatacgtcagtggcagacgggtgagtaacgcgtgggaacgtaccttttggttcggaacaacacagggaaacttgtgctaataccggataagcccttacggggaaagatttatcgccgaaagatcggcccgcgtctgattagctagttggtgaggtaatggctcaccaaggcgacgatcagtagctggtctgagaggatgatcagccacattgggactgagacacggcccaaactcctacgggaggcagcagtggggaatattggacaatgggggaaaccctgatccagccatgccgcgtgagtgatgaaggccctagggttgtaaagctcttttgtgcgggaagataatgacggtaccgcaagaataagccccggctaacttcgtgccagcagccgcggtaatacgaagggggctagcgttgctcggaatcactgggcgtaaagggtgcgtaggcgggtttctaagtcagaggtgaaagcctggagctcaactccagaactgcctttgatactggaagtcttgagtatggcagaggtgagtggaactgcgagtgtagaggtgaaattcgtagatattcgcaagaacaccagtggcgaaggcggctcactgggccattactgacgctgaggcacgaaagcgtggggagcaaacaggattagataccctggtagtccacgccgtaaacgatgaatgccagccgttagtgggtttactcactagtggcgcagctaacgctttaagcattccgcctggggagtacggtcgcaagattaaaactcaaaggaattgacgggggcccgcacaagcggtggagcatgtggtttaattcgacgcaacgcgcagaaccttaccagcccttgacatgtccaggaccggtcgcagagacgcgaccttctcttcggagcctggagcacaggtgctgcatggctgtcgtcagctcgtgtcgtgagatgttgggttaagtcccgcaacgagcgcaacccccgtccttagttgctaccatttagttgagcactctaaggagactgccggtgataagccgcgaggaaggtggggatgacgtcaagtcctcatggcccttacgggctgggctacacacgtgctacaatggcggtgacaatgggaagctaaggggcgacccttcgcaaatctcaaaaagccgtctcagttcggattgggctctgcaactcgagcccatgaagttggaatcgctagtaatcgtggatcagcatgccacggtgaatacgttcccgggccttgtacacaccgcccgtcacaccatgggagttggctttacctgaagacggtgcgctaaccagcaatgggggcagccggccacggtagggtcagcgactggggtgaagtcgtaacaaggtagccgtaggggaacctgcggctggatcatgtggtttctaaggatgggtcttcaacagcttgctgttatcgacctgttttagaaacatcagaggctctaagtcatacgagcctcattggcgggatttcgccgtcttcgtttctctttcttcgcggacgaacacgcgcctggggtggcgcgcgcattcggcttgtcggcattgtcgttgatcgatggtgccggtgctgcgtgccgcaagctgcctcacgtgctgagggcttgtagctcagttggttagagcgcgcgcttgataagcgtgaggtcggaagttcaagtcttcccaggcccaccattttgtcgagcgctgcattcgtcttctggttacggggccatagctcagctgggagagcgcgtgctttgcaagcatgaggtcgtcggttcgatcccgtctggctccaccagatggtcgattgacgttagatctcggctcgcgcctcgttgctgtcattcggacagcgacggtggctcatcgtccgcaacttgtattcgccggctttgcgcaatgcgcagcctggcgggttttctgacatcgtgaagaggagatcgatccgggttcgggtcttgcggagcaatctgcggggcttgatcgcgtatctccggagcgttttcggcgcctggttgttgcaaaacggccgggttgtaaaacgcttcttgttgacgacgcttgaccgcatcgtcatcgggtcgatcttacgaagcaataactggtctttctaatcagtgtccgtttgcggcgtcgtctttgaaggttcgtccttcgggatgtgctgcgagcaacattctgccgagtgtgtggacattgataatgagagcaatcaagtgccttaagggtgttcgacggatgccttggcgctgagaggcgatgaaggacgtgctacgctgcgataagccatggggagctgcgaagaagctttgatccgtggatttccgaatggggaaacccaccttcgatagccggaactccaaggccttgcgtttcgagagagacgtgagggtttggatttccggttatcaagagaaggtatgagatctctgaatacataggaggtttcaagcgaacccagggaactgaaacatctaagtacctggaggaaaggacatcaaccgagactccgctagtagtggcgagcgaacgcggaccaggccagtcatcattggaagacaattggaatctgtcaggaaagcagagccttagagggtgatagccccgtacaagtaattcaaccattgatgctcgagtaaggcgggacacgtgaaatcctgtctgaacatggggggaccaccctccaagcctaagtactcctcagcgaccgatagtgaaccagtaccgtgagggaaaggtgaaaagcaccccgacgaggggagtgaaatagttcctgaaatcggacacctacaaacagacggagcccaagatacgttctgggtgacgtcgtaccttttgtattatgggccagcgacttaatttaacgagcaagcttaagccggtaggtgtaggcgcagcgaaagcgagtctgaatagggcgtcaagttcgttggattagacccgaaacctagtgatctagccatgagcaggttgaaggtgaggtaacactcactggaggaccgaacgggtgcctgttgaaaaaggctccgatgacttgtggttaggggtgaaaggccaatcaaactgggaaatagctggttctccgcgaaagatatttaggtatcgcctcggacgaatacctcagggggtagagcactggatgggctagggggacttaccgtcttaccaaacccaaccaaactccgaatacctgagagtactatccgggagtcacacggcgggtgctaacgtccgtcgtggagagggaaacaaccctgacctacagctaaggcccccaattcgtggctaagtgggaaaggatgtggaaatcccaaaacaaccaggaggttggcttagaagcagccatcctttaaagaaagcgtaacagctcactggtctaaataagggtttctgcgccgaagatgtaacggggctcaagccacgagccgaagcttagggtgtgcgcaagcacgcggtagcggagcgttctgtaagcctgcgaagggcgacccgtgagggcgcctggaggtatcagaagtgcgaatgctggcatgagtaacgacaaacactgtgaaagacagtgtcgccgaaagtccaagggttcctgcgtaaagttaatcttcgcagggttagccggtccctaaggcgaggccgaaaggcgtagtcgatgggaatcacgtgaatattcgtgagccagtggatggtgacgaatcccttatgttgttcgaccttactggattggtcgggcctcgacggggttccaggaaatagcctccacatcagaccgtacccgaaaccgacacaggtggactggtagagtataccaaggcgcttgagagaactatgttgaaggaactcggcaatttacctccgtaacttcgggataaggaggccttctgtttgcgcaagcaggcaggaggggcacagaccagggggtggcaactgtttaacaaaaacacagggctctgcgaaatcgcaagatgacgtatagggtctgacgcctgcccggtgccggaaggttaagaggaggagtgcaagctctgaattgaagccccggtaaacggcggccgtaactataacggtcctaaggtagcgaaattccttgtcgggtaagttccgacctgcacgaatggcgtaatgacttccccgctgtctccaacatagactcagtgaaattgaattccccgtgaagatgcggggttcctgcggtcagacggaaagaccccgtgcacctttactgtagctttgcgctggtattcgtgactgtttgtgtagaataggtggtaggctttgaagctcgggcgccagctcgggtggagccgcaatgtgaaataccaccctaatggttatggatatctaaccgcgatcccttatcgggttccgggacagcgcatggtgggcagtttgactggggcggtcgcctcccaaagagtaacggaggcgtgcgacggtaggctcagaacggtcggaaatcgttcgtcgagtacaatggcataagcctgcctgactgcgagaccaacaagtcgagcagagacgaaagtcggtcatagtgatccggtggtcccgcgtggatgggccatcgctcaacggataaaaggtacgccggggataacaggctgatgacgcccaagagtccatatcgacggcgtcgtttggcacctcgatgtcggctcatcacatcctggggctggagaaggtcccaagggttcggctgttcgccgattaaagtggtacgtgagctgggttcagaacgtcgtgagacagttcggtccctatctgccgtgggtgttggaatgttgagaggatttgcccctagtacgagaggaccggggtgaacgtacctctggtggagctgttgtcgcgccagcggcagtgcagcatagctatgtacggacgggataaccgctgaaagcatctaagcgggaaacccacctcaaaacgagcattcccttgagaaccgtggaagacgaccacgttgataggccggatgtggaagtgcagcaatgcatgtagcttaccggtactaatcgttcgattggcttgattgctctcattatcagtgtccatcacacatgtggtgaccaaaaccagctattgcttcgtgctcttgtccttcgccggcctggtggttctagcgaggagcctgaacccgttcccatcccgaacacggccgttaaactcctcagcgccaatggtactccgtctcaagacgcgggagagtaggtcgccgccaggcctgcaaagtacaagagatcctcacaaacacacgatgtccgctcaaacaaaacacgccgcctccaaaagaggcggcgttttgcgtttgaggcctacacagatgcgacgatagttccctgtgcattgcgcggcatttcgcgctggttcatctcgatcagactagtctcgcccccgttccgactcgatccgacgtcagattgatcgtgaaccgcggcagttaagccgccgacccacaacggtcgcctgcggggcgcgccgggaaatgtgcgcggaacccctatttgtttatttttctaaatacattcaaatatgtatccgctcatgagacaataaccctgataaatgcttcaataatattgaaaaaggaagagtatgagtattcaacatttccgtgtcgcccttattcccttttttgcggcattttgccttcctgtttttgctcacccagaaacgctggtgaaagtaaaagatgctgaagatcagttgggtgcacgagtgggttacatcgaactggatctcaacagcggtaagatccttgagagttttcgccccgaagaacgttttccaatgatgagcacttttaaagttctgctatgtggcgcggtattatcccgtgttgacgccgggcaagagcaactcggtcgccgcatacactattctcagaatgacttggttgagtactcaccagtcacagaaaagcatcttacggatggcatgacagtaagagaattatgcagtgctgcaataaccatgagtgataacactgcggccaacttacttctgacaacgatcggaggaccgaaggagctaaccgcttttttgcacaacatgggggatcatgtaactcgccttgatcgttgggaaccggagctgaatgaagccataccaaacgacgagcgtgacaccacgatgcctgcagcaatggcaacaacgttgcgcaaactattaactggcgaactacttactctagcttcccggcaacaattaatagactggatggaggcggataaagttgcaggaccacttctgcgctcggcccttccggctagctggtttattgctgataaatctggagccggtgagcgtgggtctcgcggtatcattgcagcactggggccagatggtaagccctcccgtatcgtagttatctacacgacggggagtcaggcaactatggatgaacgaaatagacagatcgctgagataggtgcctcactgattaagcattggtaactgcagaccaagtttactcatatatactttagattgatttaaaacttcatttttaatttaaaaggatctaggtgaagatcctttttgataatctcatgaccaaaatcccttaacgtgagttttcgttccactgagcgtcagaccccgtagaaaagatcaaaggatcttcttgagatcctttttttctgcgcgtaatctgctgcttgcaaacaaaaaaaccaccgctaccagcggtggtttgtttgccggatcaagagctaccaactctttttccgaaggtaactggcttcagcagagcgcagataccaaatactgtccttctagtgtagccgtagttaggccaccacttcaagaactctgtagcaccgcctacatacctcgctctgctaatcctgttaccagtggctgctgccagtggcgataagtcgtgtcttaccgggttggactcaagacgatagttaccggataaggcgcagcggtcgggctgaacggggggttcgtgcacacagcccagcttggagcgaacgacctacaccgaactgagatacctacagcgtgagctatgagaaagcgccacgcttcccgaagggagaaaggcggacaggtatccggtaagcggcagggtcggaacaggagagcgcacgagggagcttccagggggaaacgcctggtatctttatagtcctgtcgggtttcgccacctctgacttgagcgtcgatttttgtgatgctcgtcaggggggcggagcctatggaaaaacgccagcaacgcggcctttttacggttcctggccttttgctgg

SEQ ID NO: 96 - DNA, 7406 bp, Artificial
  Synthetic
agacttagggaccctgcggccgccattaattcctaatttttgttgacactctatcattgatagagttattttaccactccctatcagtgatagagaaaagtgaaatgaatagaccggccgctgagaaaaagcgaagcggctacatctatccaaagcgataaatgaaaaataagtcgcagctgtttttaaaagtaaataattagatatagatagtgacagtaaacatgtacatatcacaaaagtgataattaaacctgtcaatttttaaagtaaaactgacagaatcaaacttgagagtttgatcctggctcagaacgaacgctatcggtatgcttaacacatgcaagtcgaacggactaatttggggcttgctccaattagttagtggcagacgggtgagtaacacgtgggaatctacccattagtacggaataacttttagaaataaaagctaataccgtatattctctgcggaggaaagatttatcgctgatggatgagcccgcgtcagattaggtagttggtgaggtaatagctcaccaagccgacgatctgtagctggtctgagaggatgatcagccacactgggactgagacacggcccagactcctacgggaggcagcagtggggaatattggacaatgggcgaaagcctgatccagcaataccgagtgagtgatgaaggccttagggttgtaaagctcttttagcaaggaagataatgacgttacttgcagaaaaagccccggctaactccgtgccagcagccgcggtaagacggagggggctagcgttgttcggaattactgggcgtaaagagtgcgtaggcggtttagtaagttggaagtgaaagcccggggcttaacctcggaattgctttcaaaactactaatctagagtgtagtaggggatgatggaattcctagtgtagaggtgaaattcttagatattaggaggaacaccggtggcgaaggcggtcgtctgggctacaactgacgctgatgcacgaaagcgtggggagcaaacaggattagataccctggtagtccacgccgtaaacgatgagtgctagatatcggaagattctctttcggtttcgcagctaacgcattaagcactccgcctggggagtacggtcgcaagattaaaactcaaaggaattgacgggggctcgcacaagcggtggagcatgcggtttaattcgatgttacgcgaaaaaccttaccaacccttgacatggtggtcgcggatcgcagagatgcttttcttcagctcggctggaccacacacaggtgttgcatggctgtcgtcagctcgtgtcgtgagatgttgggttaagtcccgcaacgagcgcaaccctcattcttatttgccagcgggtaatgccgggaactataagaaaactgccggtgataagccggaggaaggtggggacgacgtcaagtcatcatggcccttacgggttgggctacacgcgtgctacaatggtgtttacagagggaagcaagacggcgacgtggagcaaatccctaaaagacatctcagttcggattgttctctgcaactcgagagcatgaagttggaatcgctagtaatcgcggatcagcatgccgcggtgaatacgttctcgggccttgtacacactgcccgtcacgccatgggagttagttttacctgaaggtggtgagctaacgcaagaggcagccaaccacggtaaaattagcgactggggtgaagtcgtaacaaggtagccgtaggggaacctgcggctggattatgtggttaaagactaaattagtatattacttatacaaatataagtaattactcagtccaaatatttactgtcactatctttaactaattgtttgcttttaagactataatttcttttcttttttcaatttcctatatctcttctcaaaaacaaatactgttttgtctaaagaaagcattaaagtaatgagtaacaaaacttattggcttatatactcattagacttattatttgaaattagtgtttgacaagctttaaaaatatagatataaaactatcacgcaaagtttgaaacgtaaaactttgtagctgtttaaaaagttgataaagctaaaaactaaatacaccgcgataataaaaatttatatcgtgagtagatgctgaaaataagaaaaataattgtgaaattaattctgtatgcattgtgtaatctcaagttaaaagcataagtaaatataataagagcatttggtggatgccttggcactagaaggcgatgaaggacgtaatacgctgcgataagcttcggggagttgcgaataaactttgatccgaagatttccgaataggggaacctacctaatttattaggtattgtatagtgaatacatagctatatgaggcaaacccagcgaactgaaatatctaagtagctggaggaaaggacatcaaccgagactccgttagtagtgacgagcgaacgcggatcaggccagtggcttcaaaaaaataactaaaacaacatggaaaggttgaccatagagggtgatagtcccgtataggtaaaaagtttgaagtccttgagtaaggcgggacacgtgaaatcctgtttgaacatagggggaccaccctctaagcctaagtactctctagtgaccgatagtgaacaagtaccgtgagggaaaggtgaaaagtaccccgacaaggggagtgaaatagtatctgaaaccaaatgcttacaagcagtcggagcaagcgtatttatatgtcttgtgacggcgtaccttttgtataatgggtcagcgacttagtttatctagcaagcttaagccgttaggtgtaggcgtagcgaaagcgagtctgaatagggcgtttagttagatgaattagacccgaaaccgggtgatctagccatggccaggttgaaagcggagtaaaatccactgaaggaccgaacccactactgttgaaaaagtaggggatgagctgtggttaggggtgaaaggccaatcaaactcggatatagctggttctccgcgaaatctatttaggtagagcgttatagcgattaccatcgaaggtagagcactgaatgagctagggggtcccacagacttaccaaactcaatcaaactccgaatgtcgatgagtacagcatagcagacagactatgggtgctaaggtccatagtcgagagggaaaaagcccagaccgccatctaaggtccctaaatcatgactaagtgttaaaggatgtgagaagaccaaaacaactaggatgttggcttagaagcagccatcatttaaagaaagcgtaatagctcactagtctaaataagttttcttgcgccaacaatgtaacggggctcaagtcatgtaccgaagatgcgggtttatgcatttggcataaatggtagcggagcgttccgtaagcctgcgaaggtgaaccgtgaggtttgctggaggtatcggaagtgagaatgctgacataagtagcgataaagaatgtgagaaacattctcgccgaaagtccaagggttcttgcgtaaagttaatctgcgcaaggttagtcggcccctaagatgaggctgaaaggcgtaatcgatgggaatcaggttaatattcctgaacctgaaggatgtgacgaaaatagtaaattgtacagtcttattggattgattgtgcggtgaatattttccaggaaataacacctttattatagaccgtacccgaaaccgacacaggtggacaggtagagtataccaaggcgcttgagagaacgatgctgaaggaactaggcaaattgcatctgtaacttcggaagaaagatgacctgtatatgggcaaccatgtgcaggtggcacaagctagggggtagcgactgtttattaaaaacacagggctctgcaaagtcaatagacgatgtatagggtctgacgcctgcccagtgctggaagattaaaaggaggggtgcaagctctgaattgaagtcccagtgaacggcggccgtaactatgacggtcctaaggtagcgaaattccttgtcgggtaagttccgacccgcacgaatggcgtaacgatttccccactgtctccagtatcgactcagcgaaattgaattctccgtgaagatgcggagttcccgcggtcagacggaaagaccccgtgaacctttactatagctttgcactggtgttaggaatcagatgtgcaggataggtgggagactacgaagcgaaggcgtcagcctttgtggagtcacccttgagataccacccttttggtgcttgacatctaaccgagatccttgaatcaggatccgagacaatgcatggtgggtagtttgactggggcggtcgcctcccaaagagtaacggaggcgcgcgatggttagctcaggttggtcggaaatcaacttttagagtgcaatggcataagctagcctgactgcgagtctgacaagacgagcagagacgaaagtcggtcatagtgatccggtggtcccgagtggaagggccatcgctcaacgaataaaaggtactccggggataacaggctgatgatttccaagcgtccatagcgacgaaatcgtttggcacctcgatgtcggctcatcacatcctggggctggagaaggtcccaagggttcggctgttcgccgattaaagtggtacgtgagctgggtttagaacgtcgtgagacagttcggtccctatctgccgtgggtgtaggaagtttgagaggatctgcctttagtacgagaggaccgaggtggacgtacccctggtggaccagttgtcgtgccaacggcacagctgggtagctaagtacggaagggataactgctgaatgcatctaagcaggaaacccacctcaaaactagacttccccattagagccgtggaagaccaccacgttgataggtcggatgtggaagcacagtaatgtgtgtagctaaccgatactaatagctcgattgatttactttgctgtgagattacatatgcatatagtgttaatgctataagagtgtagtatctactcacaagttatcaggttaaatagttttatcaactaataaaaatgttattgcataactaattttatactgtagccctgccacgatatccagcgaaaatgattttgctgagtatcgtataaaagttaagatatgatgttgagaatttttttgagtcgtgcaacaacattaacagcaaactataatacaaatctatctttttaaaagtttgtattgctagcttggtggttatagcatgagtgaaacacacgatcccatcccgaactcgaatgtgaaacctcatagcgctaatggtactatgtcataaggcatgggagagtaagtcgctgccaagcttgcaatgcaaattgttaattacctttctttctctttatgagaatattttatattcataatttttacctttctctatattagtaatgcttacgtattaaagaataaacatcaatttattttagagttaccaaacgtcacagtaattaatgaaggtggaattttaactcaagaaggttatattctacaagatactcaaacaagcttaggtgatcaacatcgtttattaaaaaaacgagatattaatactggcgcgccgggaaatgtgcgcggaacccctatttgtttatttttctaaatacattcaaatatgtatccgctcatgagacaataaccctgataaatgcttcaataatattgaaaaaggaagagtatgagtattcaacatttccgtgtcgcccttattcccttttttgcggcattttgccttcctgtttttgctcacccagaaacgctggtgaaagtaaaagatgctgaagatcagttgggtgcacgagtgggttacatcgaactggatctcaacagcggtaagatccttgagagttttcgccccgaagaacgttttccaatgatgagcacttttaaagttctgctatgtggcgcggtattatcccgtgttgacgccgggcaagagcaactcggtcgccgcatacactattctcagaatgacttggttgagtactcaccagtcacagaaaagcatcttacggatggcatgacagtaagagaattatgcagtgctgcaataaccatgagtgataacactgcggccaacttacttctgacaacgatcggaggaccgaaggagctaaccgcttttttgcacaacatgggggatcatgtaactcgccttgatcgttgggaaccggagctgaatgaagccataccaaacgacgagcgtgacaccacgatgcctgcagcaatggcaacaacgttgcgcaaactattaactggcgaactacttactctagcttcccggcaacaattaatagactggatggaggcggataaagttgcaggaccacttctgcgctcggcccttccggctagctggtttattgctgataaatctggagccggtgagcgtgggtctcgcggtatcattgcagcactggggccagatggtaagccctcccgtatcgtagttatctacacgacggggagtcaggcaactatggatgaacgaaatagacagatcgctgagataggtgcctcactgattaagcattggtaactgcagaccaagtttactcatatatactttagattgatttaaaacttcatttttaatttaaaaggatctaggtgaagatcctttttgataatctcatgaccaaaatcccttaacgtgagttttcgttccactgagcgtcagaccccgtagaaaagatcaaaggatcttcttgagatcctttttttctgcgcgtaatctgctgcttgcaaacaaaaaaaccaccgctaccagcggtggtttgtttgccggatcaagagctaccaactctttttccgaaggtaactggcttcagcagagcgcagataccaaatactgtccttctagtgtagccgtagttaggccaccacttcaagaactctgtagcaccgcctacatacctcgctctgctaatcctgttaccagtggctgctgccagtggcgataagtcgtgtcttaccgggttggactcaagacgatagttaccggataaggcgcagcggtcgggctgaacggggggttcgtgcacacagcccagcttggagcgaacgacctacaccgaactgagatacctacagcgtgagctatgagaaagcgccacgcttcccgaagggagaaaggcggacaggtatccggtaagcggcagggtcggaacaggagagcgcacgagggagcttccagggggaaacgcctggtatctttatagtcctgtcgggtttcgccacctctgacttgagcgtcgatttttgtgatgctcgtcaggggggcggagcctatggaaaaacgccagcaacgcggcctttttacggttcctggccttttgctgg

SEQ ID NO: 97 - DNA, 7412 bp, Artificial
  Synthetic
agacttagggaccctgcggccgccattaattcctaatttttgttgacactctatcattgatagagttattttaccactccctatcagtgatagagaaaagtgaaatgaatagaccggccgctgagaaaaagcgaagcggcggcgaagcggggcataacgcctcctcgccgcgacggaaacgcgcggcctgtttttcggttccttgaaaagtgaatagcgagtcgggagaatagaagatcagcctatttgagtcatgtcccgaaagggatgtggtctctccattttctaactggagagtttgattctggctcagattgaacgctggcggcgtgcttaacacatgcaagtcgcgcgtgaaagggcttcggcccgagtaaagcggcgcacgggtgagtaacgcgtggatgatctacccatgagttgggaataacggctggaaacggtcgctaataccgaatacgctccgatttcaacttcgggggaaaggtggcctctgcttgcaagctactgctcatggatgagtccgcgtcccattagctagttggtggggtaacggcccaccaaggcgacgatgggtagccggtctgagaggatgaccggccacactgggactggaacacggcccagactcctacgggaggcagcagtggggaatattgcgcaatgggcgaaagcctgacgcagcgacgccgcgtgagggatgaaggtcctcggatcgtaaacctctgtcaggagggaagaaccgccacggtgctaatcagccgtggtctgacggtacctccaaaggaagcaccggctaactccgtgccagcagccgcggtaatacggagggtgcgagcgttaatcggaatcactgggcgtaaagcgcacgtaggctgcttggtaagtcaggggtgaaagcccgcggctcaaccgcggaattgcctttgatactgccgagctagagtccgggagagggtagtggaattccaggtgtaggagtgaaatccgtagagatctggaggaacatcagtggcgaaggcgactacctggaccggtactgacgctgaggtgcgaaagcgtggggagcaaacaggattagataccctggtagtccacgccgtaaacgatggatgctaggtgtcggggccttgagcttcggtgccgtagttaacgcgttaagcatcccgcctggggagtacggtcgcaaggctgaaactcaaagaaattgacgggggcccgcacaagcggtggagtatgtggtttaattcgatgcaacgcgaagaaccttacctaggtttgacatccggaagaccttcccgaaaaggaagggtgcccttcggggaattccgagacaggtgctgcatggctgtcgtcagctcgtgccgtgaggtgttgggttaagtcccgcaacgagcgcaacccctattgccagttgctaccaggtaatgctgggcactctggtgagactgccccggttaacggggaggaaggtggggacgacgtcaagtcatcatggcccttacgcctagggctacacacgtactacaatggcgcatacaaagggcagcgataccgcgaggtggagccaatcccaaaaagtgcgtcccagtccggattgcagtctgcaactcgactgcatgaagttggaatcgctagtaattcgagatcagcatgctcgggtgaatgcgttcccgggccttgtacacaccgcccgtcacaccacgaaagttggttttacccgacaccggtgagctaaccagcaatggaggcagccgtctacggtagggccgatgattggggtgaagtcgtaacaaggtagccgtaggggaacctgcggctggatcatgtggtttaccgaatacgaaactcccgactcgctgctcactttcaaggagccgaagtgctctttgcaaagcagagccgacgggcctgtagctcaggtggctagagcgcacgcctgataagcgtgaggtcggaagttcaagtcttcccaggcccaccacgtcaggcgacacgcaccaagtgggggcgtagctcagctgggagagcacctgccttgcacgcagggggtcaacggttcaatcccgttcgcctccaccatttggtggacgacggatggttctttgtcatgcgcgaatatggtcgcagtcacgaaagattcgtggatgtcatccaggttcgcgcctggcctcggcggtaagccgaagctcattgaaaattgaatagggttggaaaggaagttcgaagagaacaagttaccaagggcaacaggtggatgccttggcgctggaaggcgaagaaagacgtggtaggctgcgataagtctcggggaggagccaaacatcctttgatccgggaatgtctgaatggggaaacccggcaggagtcatgtcctgtcacccgcaactgaacaaataggttgcagggagccaacccggggaagtgaaacatctcagtacccggaggaaaggaaatcaaacgagactcccgaagtagcggcgagcgaaccgggattagcccaaaccggatggtttcgaccatccggggttgtaggacctcgatgtgggattgactactaggcaggagaagtgagctggaaagctccgccatagcgagtgatagcctcgtatctgaaaccgaacgtcaccctagaggcacctgagtactgcgaggcacgtgaaacctcgtgggaatctgggaggaccatcttccaaggctaagtactaaccagcgaccgatagtgcactagtaccgtgagggaaaggtgaaaagaacccctgtcaggggagtgaaatagaatctgaaacctgttgcctacaagctgtgggagcatccttgagatgtgaccgcgtgccttttgcataatgagtcagcgagttactctgtcgtgcgaggttaagcgaaagtggagccgtagcgaaagcgagtctgataagggcgataagtacgacggagtagacccgaaaccgggtgatctatccatgagcaggttgaagcaagggtaaagccttgtggaggaccgaaccagtaacggctgaaaacgttttggatgacttgtggataggggtgaaaggccaatcaaactcggtgatagctggttctccccgaaatatattgaggtatagcctcgggaaattgtctcgcggaggtagagcactgacagggctaggggtcccaccagattaccaaaccctttcaaactccgaatgccgcagagatgtaccccgggagtcagacggcgggtgcgaaggtccgtcgtcaaaagggaaacagcccagatcgacagctaaggcctccaattccatgctcagtgggaaaggtggtggagttgttcagacagccaggacgttggcttagaagcagccatcgtttaaagaaagcgtaatagctcactggtctaatgactctgcgccgaaaatgtaacggggctaagcatggagccgaagcttcgggatcgtctagtacgatcggtaggggagcgttctctgtgggctgaaggtttgccggaaggcacgctggactgcagagaagtgattatgctgacatgagtaacgataaaacaggtgagaaacctgttcgccgtaaacccaaggtttcctgggtaaaggtaatcttcccagggttagtcggtccctaaggcgagggcgaaagccgtagtcgatgggaaacgggttaatattcccgtacctgtgcgttcgcgcgatggagggacggagaaggataagcgagccggctgttggcttagccggtgcaagtgcgtaggcttgggggagaggcaaatccgccccctttaaggccgagacacgagtccgtgaccgcaaggtctgaagtcgccgagtccatgctccctagaaaagctcctaagtatagtgcgtacagaccgtaccggaaaccaacacaggtgggtggggtgaataacccaaggcgctcgagagaactctggccaaggaactcggcaaaatgaccccgtaacttcggaagaaggggtgctctctaaggtgtagggtatacatccaaagcctcggagagccgcagtgaaatggtggtggcgactgtttactaaaaacataggtctctgcgaagtcgcaagacgacgtatagggactgacgcctgcccggtgccggaaggttaagaggaggggtcagcgcaagcgaagctccgaatcgaagccccggtaaacggcggccgtaactataacggtcctaaggtagcgaaattccttgtcgggtaagttccgacctgcacgaatggcgtaacgatctccacactgtctcggccagagactcggtgaaattgaagtcgcggtgaaaatgccgtgtacccgcagaaagacggaaagaccctgtgcacctttactatagcttgacattgggttttgggcttgcatgtgtaggataggtgggaggctgtgaaccctgtacgccagtatggggggagccatccttgaaataccacccttgcaagtctaaggctctaatccctacccgtgatccgggagggagacagtgtctggtgggtagtttgactggggcggtcgcctcccaaattgtaacggaggcacgcaaaggttccctcagcctgattggaaaccaggcgtcgagtgcaaacgcataagggagcttgactgcaagacagacatgtcgagcagggacgaaagtcggcgttagtgatccggtggttccgcatggaagggccatcgctcattggataaaaggtacgccggggataacaggctgatcgcgcccaagagttcatatcgacggcgcggtttggcacctcgatgtcggctcatcacatcctggggctgaagcaggtcccaagggtacggctgttcgccgtttaaagtggtacgcgagctgggtttaaaacgtcgtgagacagtttggtccctatcttctgtgggcgtaggagaattgagagggcctgtccctagtacgagaggaccgggatggacatacctctggtggtcctgttgtcgcgccagcggcatagcagggtagctatgtgtggaagggataaccgctgaaagcatctaagcgggaagcctgcctcaagataagttctcccctcttttagagctgaagggcccaggtagactacctggtcgataggctggaggtggaagtgcggcgacgcatggagctgaccagtactaatagcccgagcgccttgttttcttcataaaactcctttccaccctatttgattctatttcggtcccgtacgaagtggcggcgtaagcatagccagccttcccggacggtgaccaaagaatctgtcctggcgtccatggaggagggggtacacccgatcccattccgaactcggaagttaagccctccatcgccgatgatactgcggggtagctcgtgggaaagtaggccgacgccaggacttttctttttcagaacacaaggggcggtgaccatatcggtcgccgcgccttcgtgcgttctggcaccagccgtgccgccttgcgaagcccacccctctgggccgcatgacgtccctcctcgaggccccccattggagcgtatcaagccctctgaccccttcgccgacatccgctcggagcatccctccttgccgcaggataggcccctgcctgggctctccctcggatgccctctttctgctgtgccagcgcgccgggaaatgtgcgcggaacccctatttgtttatttttctaaatacattcaaatatgtatccgctcatgagacaataaccctgataaatgcttcaataatattgaaaaaggaagagtatgagtattcaacatttccgtgtcgcccttattcccttttttgcggcattttgccttcctgtttttgctcacccagaaacgctggtgaaagtaaaagatgctgaagatcagttgggtgcacgagtgggttacatcgaactggatctcaacagcggtaagatccttgagagttttcgccccgaagaacgttttccaatgatgagcacttttaaagttctgctatgtggcgcggtattatcccgtgttgacgccgggcaagagcaactcggtcgccgcatacactattctcagaatgacttggttgagtactcaccagtcacagaaaagcatcttacggatggcatgacagtaagagaattatgcagtgctgcaataaccatgagtgataacactgcggccaacttacttctgacaacgatcggaggaccgaaggagctaaccgcttttttgcacaacatgggggatcatgtaactcgccttgatcgttgggaaccggagctgaatgaagccataccaaacgacgagcgtgacaccacgatgcctgcagcaatggcaacaacgttgcgcaaactattaactggcgaactacttactctagcttcccggcaacaattaatagactggatggaggcggataaagttgcaggaccacttctgcgctcggcccttccggctagctggtttattgctgataaatctggagccggtgagcgtgggtctcgcggtatcattgcagcactggggccagatggtaagccctcccgtatcgtagttatctacacgacggggagtcaggcaactatggatgaacgaaatagacagatcgctgagataggtgcctcactgattaagcattggtaactgcagaccaagtttactcatatatactttagattgatttaaaacttcatttttaatttaaaaggatctaggtgaagatcctttttgataatctcatgaccaaaatcccttaacgtgagttttcgttccactgagcgtcagaccccgtagaaaagatcaaaggatcttcttgagatcctttttttctgcgcgtaatctgctgcttgcaaacaaaaaaaccaccgctaccagcggtggtttgtttgccggatcaagagctaccaactctttttccgaaggtaactggcttcagcagagcgcagataccaaatactgtccttctagtgtagccgtagttaggccaccacttcaagaactctgtagcaccgcctacatacctcgctctgctaatcctgttaccagtggctgctgccagtggcgataagtcgtgtcttaccgggttggactcaagacgatagttaccggataaggcgcagcggtcgggctgaacggggggttcgtgcacacagcccagcttggagcgaacgacctacaccgaactgagatacctacagcgtgagctatgagaaagcgccacgcttcccgaagggagaaaggcggacaggtatccggtaagcggcagggtcggaacaggagagcgcacgagggagcttccagggggaaacgcctggtatctttatagtcctgtcgggtttcgccacctctgacttgagcgtcgatttttgtgatgctcgtcaggggggcggagcctatggaaaaacgccagcaacgcggcctttttacggttcctggccttttgctgg

SEQ ID NO: 98 - DNA, 7504 bp, Artificial
  Synthetic
agacttagggaccctgcggccgccattaattcctaatttttgttgacactctatcattgatagagttattttaccactccctatcagtgatagagaaaagtgaaatgaatagaccggccgctgagaaaaagcgaagcggctttctttctgttttgttgttgcaatacttaagaacacaacccgttttattcaataataaaataagacgagttcttgtgatacgctaaagctgttattaggaatgataacagcctatcaaaaaacaaaagagctttaggacaaacacttttatggagagtttgatcctggctcagagtgaacgctggcggcgtgcctaatacatgcaagtcgaacgatgaagctttctagcttgctagaaggctgattagtggcgcacgggtgagtaacgcataggttatgtgccttttagtttgggatagccattggaaacgatgattaataccagatactccctacgggggaaagatttatcgctaagagatcagcctatgtcctatcagcttgttggtaaggtaatggcttaccaaggctatgacgggtatccggcctgagagggtgaacggacacactggaactgagacacggtccagactcctacgggaggcagcagtagggaatattgctcaatgggggaaaccctgaagcagcaacgccgcgtggaggatgaaggttttaggattgtaaactccttttgttagagaagataatgacggtatctaacgaataagcaccggctaactccgtgccagcagccgcggtaatacggagggtgcaagcgttactcggaatcactgggcgtaaagagcgcgtaggcgggatagtcagtcaggtgtgaaatcctatggcttaaccatagaactgcatttgaaactactattctagagtgtgggagaggtaggtggaattcttggtgtaggggtaaaatccgtagagatcaagaggaatactcattgcgaaggcgacctgctggaacattactgacgctgattgcgcgaaagcgtggggagcaaacaggattagataccctggtagtccacgccctaaacgatggatgctagttgttggagggcttagtctctccagtaatgcagctaacgcattaagcatcccgcctggggagtacggtcgcaagattaaaactcaaaggaatagacggggacccgcacaagcggtggagcatgtggtttaattcgaagatacacgaagaaccttacctaggcttgacattgagagaatccgctagaaatagtggagtgtctggcttgccagaccttgaaaacaggtgctgcacggctgtcgtcagctcgtgtcgtgagatgttgggttaagtcccgcaacgagcgcaaccccctttcttagttgctaacaggtcatgctgagaactctaaggatactgcctccgtaaggaggaggaaggtggggacgacgtcaagtcatcatggcccttacgcctagggctacacacgtgctacaatggggtgcacaaagagaagcaatactgcgaagtggagccaatcttcaaaacatctctcagttcggattgtaggctgcaactcgcctgcatgaagctggaatcgctagtaatcgcaaatcagccatgttgcggtgaatacgttcccgggtcttgtactcaccgcccgtcacaccatgggagttgtgtttgccttaagtcaggatgctaaattggctactgcccacggcacacacagcgactggggtgaagtcgtaacaaggtaaccgtaggtgaacctgcggttggatcatgtggtttctagagaaaagcttttgatattcgcttattgaaagccaagagtattacctgacaaaagaacttcttgttgcttagttttgaaagattgggcttaatctttctttttattttgcttgttatcttctttgttttattggattattgattttattgattttggtttgattgatttcaatcgcttgtttttggttgtttaaatcttattttttcattcttgtgtcttactttaaagggtttaacattaagagcaattatagcaagtttttaaagaaaaacgaagttatttgatttaacattgttaatagcctatgtaaaagtaaagtaaaactacaataactctgtcttatattcattaaggcagtggtagcgctgaagaatattcgtgcaattgtcgttattcattataaaagggcgggttttaaaggatattttaaaatttaaaacaagcttttaagagcagatggcggatgccttgccaaagagaggcgatgaaggacgtactagactgcgataagctatgcggagctgtcaaggagctttgatgcgtagatgtccgaatggggcaacccaactaatagagatattagttactctaatttagagagcgaacctagtgaagtgaaacatctcagtaactagaggaaaagaaatcaacgagattccctaagtagtggcgagcgaacggggaaaagggcaaaccgagtgcttgcattcggggttgaggactgcaacatccaagagaacgctttagcagagttacctggaaaggtaagccatagaaagtgatagccttgtatgcgacaaggcgttcttaggtagcaggatccagagtaggccaggacacgagaaatccaggttgaagccggggagaccactctccaaccctaaatactactctttgagcgatagcgaacaagtaccgtgagggaaaggtgaaaagaaccgcagtgagcggagtgaaatagaacctgaaaccatctgtttacaatcattcagagccctatgatttatcagggtgatggactgccttttgcataatgatcctgcgagttgtggtatctggcaaggttaagcggatgcgaagccgtagcgaaagcgagtcttaatagggcgatttaagtcagatgctgcagacccgaagctaagtgatctatccatggccaagttgaaacgcgtgtaatagcgcgtggaggactgaactcgtacccattgaaacgggttgggatgagctgtggataggggtgaaaggccaaacaaacttagtgatagctggttctcttcgaaatatatttaggtatagcctcaagtgataataaaagggggtagagccctgattgggctagggctgctcgccgcggtaccaaaccctatcaaacttcgaataccttttatcgtatcttgggagtcaggcggtgggtgataaaatcaatcgtcaaaaggggaacaacccagactaccaaataaggtccctaagttctattctgagtggaaaaagatgtgtggctactcaaacaaccaggaggttggcttagaagcagccatcctttaaagaaagcgtaacagctcactggtctagtggtcatgcgctgaaaatataacggggctaagatagacaccgaatttgtagattgtgttaaacacagtggtagaagagcgttcataccagcgttgaaggtataccggtaaggagtgctggagcggtatgaagtgagcatgcaggaatgagtaacgataagatatatgagaattgtatccgccgtaaatctaaggtttcctacgcgatggtcgtcatcgtagggttagtcgggtcctaagccgagtccgaaaggggtaggtgatggcaaattggttaatattccaataccgacttatggagcgtgatggggggacgcatagggttaagcgagctagctgatggaagcgctagtctaagggcgtagattggagggaaggcaaatccacctctgtatttgaaacccaaacaggctctttgagtccttttaggacaaagggagaatcgctgataccgtcgtgccaagaaaagcctctaagcatatccatagtcgtccgtaccgcaaaccgacacaggtagatgagatgagtattctaaggcgcgtgaaagaactctggttaaggaactctgcaaactagcaccgtaagttcgcgataaggtgtgccgcagcaatgcggtctcagcaaagagtccctcccgactgtttaccaaaaacacagcactttgccaactcgtaagaggaagtataaggtgtgacgcctgcccggtgctcgaaggttaagaggatgcgtcagtcgcaagatgaagcgttgaattgaagcccgagtaaacggcggccgtaactataacggtcctaaggtagcgaaattccttgtcggttaaataccgacctgcatgaatggcgtaacgagatgggagctgtctcaaccagagattcagtgaaattgtagtggaggtgaaaattcctcctacccgcggcaagacggaaagaccccgtggacctttactacaacttagcactgctaacgggaatatcatgcgcaggataggtgggaggctttgaagtaagggctttggctcttatggagccatccttgagataccacccttgatgtttctgttagctaactggcctgtgttatccacaggcaggacaatgcttggtgggtagtttgactggggcggtcgcctcctaaaaagtaacggaggcttgcaaaggttggctcattgcggttggaaatcgcaagttgagtgtaatggcacaagccagcctgactgtaagacatacaagtcaagcagagacgaaagtcggtcatagtgatccggtggttctgtgtggaagggccatcgctcaaaggataaaaggtaccccggggataacaggctgatctcccccaagagctcacatcgacggggaggtttggcacctcgatgtcggctcatcgcatcctggggctggagcaggtcccaagggtatggctgttcgccatttaaagcggtacgcgagctgggttcagaacgtcgtgagacagttcggtccctatctgccgtgggcgtaggaaagttgaggagagctgtccctagtacgagaggaccgggatggacgtgtcactggtgcaccagttgttctgccaagagcatcgctgggtagctacacacggatgtgataactgctgaaagcatctaagcaggaagccaactccaagatgaactttccctgaagctcgcacaaagactatgtgcttgatagggtagatgtgtaagcgcagtaatgcgtttagctgactactactaatagagcgtttggcttgttttttgctttttgtataagataacggcaataagcgcggataagttaccactgccttactgagtgtaagagagttggagttttataaagacttttatacgattaaactttaatgagaaacaagataaaatctaacttgttttaattaaagggctattaactatcttctaaaaacagctccccataaagagaaaggggagttaagggtaaatgcgttttatctttagctcccttttccttgtgcctttagagaagaggaactacccagttaaccattccgaacctggaagtcaagctcttcatcgctgataatactgctcttttcaagagtgggaatgtaggtcggtgcagggatagggaaatgtttttttagtcttgcttttttatgtaattttattattgactcattgttttgttttttaaggtgttatttagttttttacgctaaagtttctcagtttctggagatgagaggtatgggcaattaagaaaatgggtagagaataccaacaattaggaggtttttatggtcgtagatgtttcaagcattccttttcaagaattttggcacatgcaaatccatcagcaacatctgcaagtaaggcgcgccgggaaatgtgcgcggaacccctatttgtttatttttctaaatacattcaaatatgtatccgctcatgagacaataaccctgataaatgcttcaataatattgaaaaaggaagagtatgagtattcaacatttccgtgtcgcccttattcccttttttgcggcattttgccttcctgtttttgctcacccagaaacgctggtgaaagtaaaagatgctgaagatcagttgggtgcacgagtgggttacatcgaactggatctcaacagcggtaagatccttgagagttttcgccccgaagaacgttttccaatgatgagcacttttaaagttctgctatgtggcgcggtattatcccgtgttgacgccgggcaagagcaactcggtcgccgcatacactattctcagaatgacttggttgagtactcaccagtcacagaaaagcatcttacggatggcatgacagtaagagaattatgcagtgctgcaataaccatgagtgataacactgcggccaacttacttctgacaacgatcggaggaccgaaggagctaaccgcttttttgcacaacatgggggatcatgtaactcgccttgatcgttgggaaccggagctgaatgaagccataccaaacgacgagcgtgacaccacgatgcctgcagcaatggcaacaacgttgcgcaaactattaactggcgaactacttactctagcttcccggcaacaattaatagactggatggaggcggataaagttgcaggaccacttctgcgctcggcccttccggctagctggtttattgctgataaatctggagccggtgagcgtgggtctcgcggtatcattgcagcactggggccagatggtaagccctcccgtatcgtagttatctacacgacggggagtcaggcaactatggatgaacgaaatagacagatcgctgagataggtgcctcactgattaagcattggtaactgcagaccaagtttactcatatatactttagattgatttaaaacttcatttttaatttaaaaggatctaggtgaagatcctttttgataatctcatgaccaaaatcccttaacgtgagttttcgttccactgagcgtcagaccccgtagaaaagatcaaaggatcttcttgagatcctttttttctgcgcgtaatctgctgcttgcaaacaaaaaaaccaccgctaccagcggtggtttgtttgccggatcaagagctaccaactctttttccgaaggtaactggcttcagcagagcgcagataccaaatactgtccttctagtgtagccgtagttaggccaccacttcaagaactctgtagcaccgcctacatacctcgctctgctaatcctgttaccagtggctgctgccagtggcgataagtcgtgtcttaccgggttggactcaagacgatagttaccggataaggcgcagcggtcgggctgaacggggggttcgtgcacacagcccagcttggagcgaacgacctacaccgaactgagatacctacagcgtgagctatgagaaagcgccacgcttcccgaagggagaaaggcggacaggtatccggtaagcggcagggtcggaacaggagagcgcacgagggagcttccagggggaaacgcctggtatctttatagtcctgtcgggtttcgccacctctgacttgagcgtcgatttttgtgatgctcgtcaggggggcggagcctatggaaaaacgccagcaacgcggcctttttacggttcctggccttttgctgg

SEQ ID NO: 99 - DNA, 7543 bp, Artificial
  Synthetic
agacttagggaccctgcggccgccattaattcctaatttttgttgacactctatcattgatagagttattttaccactccctatcagtgatagagaaaagtgaaatgaatagaccggccgctgagaaaaagcgaagcggcgtagtacaagaaaaaaatagaaccgtcaatacttgtcttatatgtagtaatatgtatgagtcataaggtattaatgaagtcaataaattgtacggcatcctgaacagagcaaaaatcagctttatgctgactaacaatacttttacaatgaagagtttgatcctggctcaggatgaacgctagctacaggcttaacacatgcaagtcgaggggcagcatttcagtttgcttgcaaactggagatggcgaccggcgcacgggtgagtaacacgtatccaacctgccgataactcggggatagcctttcgaaagaaagattaatacccgatggtataatcagaccgcatggtcttgttattaaagaatttcggttatcgatggggatgcgttccattaggcagttggtgaggtaacggctcaccaaaccttcgatggataggggttctgagaggaaggtcccccacattggaactgagacacggtccaaactcctacgggaggcagcagtgaggaatattggtcaatgggcgcaggcctgaaccagccaagtagcgtgaaggatgactgccctatgggttgtaaacttcttttatatgggaataaagttttccacgtgtggaattttgtatgtaccatatgaataaggatcggctaactccgtgccagcagccgcggtaatacggaggatccgagcgttatccggatttattgggtttaaagggagcgtaggtggacagttaagtcagttgtgaaagtttgcggctcaaccgtaaaattgcagttgatactggctgtcttgagtacagtagaggtgggcggaattcgtggtgtagcggtgaaatgcttagatatcacgaagaactccgattgcgaaggcagctcactggactgcaactgacactgatgctcgaaagtgtgggtatcaaacaggattagataccctggtagtccacacagtaaacgatgaatactcgctgtttgcgatatacagtaagcggccaagcgaaagcattaagtattccacctggggagtacgccggcaacggtgaaactcaaaggaattgacgggggcccgcacaagcggaggaacatgtggtttaattcgatgatacgcgaggaaccttacccgggcttaaattgcatttgaatatattggaaacagtatagccgtaaggcaaatgtgaaggtgctgcatggttgtcgtcagctcgtgccgtgaggtgtcggcttaagtgccataacgagcgcaacccttatctttagttactaacaggtcatgctgaggactctagagagactgccgtcgtaagatgtgaggaaggtggggatgacgtcaaatcagcacggcccttacgtccggggctacacacgtgttacaatggggggtacagaaggcagctacctggtgacaggatgctaatcccaaaagcctctctcagttcggatcgaagtctgcaacccgacttcgtgaagctggattcgctagtaatcgcgcatcagccatggcgcggtgaatacgttcccgggccttgtacacaccgcccgtcaagccatgaaagccgggggtacctgaagtacgtaaccgcaaggagcgtcctagggtaaaactggtaattggggctaagtcgtaacaaggtagccgtaccggaaggtgcggctggaacatgtggtttctggagcgatgtcgttacaacgatttcataggttctattattgtactactggtacttgtttatttataacatatagatcaaccatctatagaagtatagatagagataaacaagagaaaagaaagaagccgagtctaacatcaggtagacaaggttgaactagtcctatagctcagttggttagagcgctacactgataatgtagaggtcggcagttcaactctgcctgggactactccgaacaaaaattgtcgttgtcaattcattattgcaatgttcaattactcttgggggattagctcagctggctagagcatctgccttgcacgcagagggtcaacggttcgaatccgttattctccacagtctctgaaaagagaaacgatctttgacatgatgtacaaaaagtaaaatttagtaaagagctaaaagtatatatcgaaccgtacgttttaagtacaacactattaagtactttgggttaatacctgatacttaatacctgatacttaaaagtaagtttgaaagaaagtaagcaagggcgcatggcggatgccttggctctcggaggcgatgaaggacgtgataagctgcgataagctctgggtaggtgcaaataacctttgatccagagatttccgaatgggacaacccggcattctgaaggaatgtcatccatctttgatggaagctaacgcagggaactgaaacatcttagtacctgtaggaaaagaaaataataatgattcccctagtagtggcgagcgaacggggaatagcccaaaccacccatgttacggcatgtgtggggttgtaggaccacgatgtcgcaagacatttgatgagtagaatcctctggaaagttgaaccatagacggtgatagtccggtatacgaagtcaaattaagcgtagtggtatcctgagtagcgcgggacacgagaaatcttgcgtgaatctgccgggaccatccggtaaggctaaatactcccgagagaccgatagcgaaccagtactgtgaaggaaaggtgaaaagcacttcgaatagaagagtgaaatagtccctgaaaccgtgcgcctacaagcggtcggagctgcttaagcagtgacggcgtgccttttgcataatgaacctacgagttactttttccggcaaggttaagcatcttgagatgtgcagccgaagcgaaagcgagtctgaacagggcgtcgagtcggaaggagtagacgcgaaaccaagtgatctacccttggtcaggttgaaggttaggtaacactaactggaggaccgaaccgataagcgttgaaaagcttccggatgaactgagggtgggggtgaaaggctaatcaaacttggagatagctcgtactccccgaaatgcatttaggtgcagccttgtgagttactaatgtgaggtagagcgactgataagatgcgagggcttcaccgcctatcaagtcttgataaactccgaatgcgcattagttctatcacaggagtgagggcatgggtgctaaggtccatgtcctaaaggagaagaatccagaccatcagctaaggtccccaaataaacactaagttgaactaacgaagtcagattgctaagacagctaggatgttggcttggaagcagccattcatttaaagagtgcgtaacagctcactagtcgaggagtttggcgtggataataatcgggcattaagtgttttaccgaagctatgggatcagtaatgatcggtaggggagcattccactctgcgtcgaaggtgaagcgtgagctttgctggagcgtgtggaaaagcaaatgtaggtataagtaacgataaagggggtgagaaaccccctcgccgaaagactaaggtttcctgatcaacgctaatcggatcagggttagtcgggtcctaaggctcagccgaacggtgaggccgatggcagaacaggttaatattcctgtactaccttaaggagtgacgtggagacggagcagtgacagcgccgcggactgacggaatagtccgttgaagggtgtagatgttgatcatcccaggcaaatccgggatgagagtcgaacctgatagtatggagcgttcttcggaacaatccaatagtgcgtgtaagcatactcccaagaaaatccgctaaacttaatccttaaggtacccgtaccgcaaacggacacacgtagtcgggttgaatatactaaggcgcttgagtgattcacggttaaggaactaggcaaattgaccctgtaacttcgggataaagggtcccaacgagagttgggcgcagagaataggtccaggcaactgtttaacaaaaacacagggctgtgccaaattgaaagattacgtatacagcctgacacctgcccggtgctggaaggttaagaggagatgtcatcgcaagagaagcattgaattgaagccccagtaaacggcggccgtaactataacggtcctaaggtagcgaaattccttgtcgggtaagttccgacctgcacgaatggtgtaatgatctggacactgtctcaaccgtgagctcagtgaaattgtagtatcggtgaagatgccgattacccgcgatgggacgaaaagaccccgtgaacctttactatagcttaacattgaatttgggtaattgatgtgtaggataggccggagactttgaagcaggtacgccagtatttgtggagtcgctgttgaaatacggccctttgattatttgagttctaactcgtagttgcgaggacactgtttggtgggtagtttgactggggtggtcgcctccaaaatagtaacggaggcttctaaaggtgccctcaggacgattggtaaccgtccgtagagtgtaatggcataagggcgcttgactgggagactaacaagtcgatcaggtaggaaactagagcatagtgatccggtgtttccgtatggaagggacatcgctcaaaggataaaaggtactccggggataacaggctgatccctcccaagagctcatatcgacggaggggtttggcacctcgatgtcggctcgtcacatcctggggctggagaaggtcccaagggttgggctgttcgcccattaaagtggcacgcgagctgggttcagaacgtcgtgagacagttcggtctctatctatcgtgggcgtatgaaatttgcgtggctctgacactagtacgagaggaccgtgttggactgaccgctggtttaccagttgtgccgccaggtgcattgctgggtatctaagtcgggattggataagtgctgaaagcatctaagtacgaagccagccacaagattagatttcttagggtcgttaaagacgatgacgttgataggatgcaggtgtaaaggtggtaacatcaaagccgagcattactaattgcccgttcactttctttcggacggtgcggatcgcgatatatacgtttagcttttttaattgacaattgacaaatgacaattgacaattgacaattagattaacagatacttgaattttactttttatcatgtcataacttatcatgacagctgcgataattgtcatttgtcaattgtccattgtcaattgaagaaattcaggtggttatagcacgagggttccacctcttcccattccgaacagagaagttaagcctcgtcacgccgatggtactgcgtaacagtgggagagtaggtagccgccatttttagagaagcccttccggtagaaataccagaagggctttattgtgtttgatactttcggaatttaagtacacatcatccacatacttcaaatctcctgttctgctaaaaaataaacgaccggacaatcttttataatactatttttcagtatccttttcagcctctttttccttcaatttcattctttttccttctgttttatttaaaatcccatattctgccaagactaaataccctttcaaaattgagcgcgccgggaaatgtgcgcggaacccctatttgtttatttttctaaatacattcaaatatgtatccgctcatgagacaataaccctgataaatgcttcaataatattgaaaaaggaagagtatgagtattcaacatttccgtgtcgcccttattcccttttttgcggcattttgccttcctgtttttgctcacccagaaacgctggtgaaagtaaaagatgctgaagatcagttgggtgcacgagtgggttacatcgaactggatctcaacagcggtaagatccttgagagttttcgccccgaagaacgttttccaatgatgagcacttttaaagttctgctatgtggcgcggtattatcccgtgttgacgccgggcaagagcaactcggtcgccgcatacactattctcagaatgacttggttgagtactcaccagtcacagaaaagcatcttacggatggcatgacagtaagagaattatgcagtgctgcaataaccatgagtgataacactgcggccaacttacttctgacaacgatcggaggaccgaaggagctaaccgcttttttgcacaacatgggggatcatgtaactcgccttgatcgttgggaaccggagctgaatgaagccataccaaacgacgagcgtgacaccacgatgcctgcagcaatggcaacaacgttgcgcaaactattaactggcgaactacttactctagcttcccggcaacaattaatagactggatggaggcggataaagttgcaggaccacttctgcgctcggcccttccggctagctggtttattgctgataaatctggagccggtgagcgtgggtctcgcggtatcattgcagcactggggccagatggtaagccctcccgtatcgtagttatctacacgacggggagtcaggcaactatggatgaacgaaatagacagatcgctgagataggtgcctcactgattaagcattggtaactgcagaccaagtttactcatatatactttagattgatttaaaacttcatttttaatttaaaaggatctaggtgaagatcctttttgataatctcatgaccaaaatcccttaacgtgagttttcgttccactgagcgtcagaccccgtagaaaagatcaaaggatcttcttgagatcctttttttctgcgcgtaatctgctgcttgcaaacaaaaaaaccaccgctaccagcggtggtttgtttgccggatcaagagctaccaactctttttccgaaggtaactggcttcagcagagcgcagataccaaatactgtccttctagtgtagccgtagttaggccaccacttcaagaactctgtagcaccgcctacatacctcgctctgctaatcctgttaccagtggctgctgccagtggcgataagtcgtgtcttaccgggttggactcaagacgatagttaccggataaggcgcagcggtcgggctgaacggggggttcgtgcacacagcccagcttggagcgaacgacctacaccgaactgagatacctacagcgtgagctatgagaaagcgccacgcttcccgaagggagaaaggcggacaggtatccggtaagcggcagggtcggaacaggagagcgcacgagggagcttccagggggaaacgcctggtatctttatagtcctgtcgggtttcgccacctctgacttgagcgtcgatttttgtgatgctcgtcaggggggcggagcctatggaaaaacgccagcaacgcggcctttttacggttcctggccttttgctgg

SEQ ID NO: 100 - DNA, 7396 bp, Artificial
  Synthetic
agacttagggaccctgcggccgccattaattcctaatttttgttgacactctatcattgatagagttattttaccactccctatcagtgatagagaaaagtgaaatgaatagaccggccgctgagaaaaagcgaagcggcactgctctttaacaatttatcagacaatctgtgtgggcactcgaagatacggattcttaacgtcgcaagacgaaaaatgaataccaagtctcaagagtgaacacgtaattcattacgaagtttaattctttgagcgtcaaacttttacaatgaagagtttgatcctggctcaggatgaacgctagctacaggcttaacacatgcaagtcgaggggcagcatttcagtttgcttgcaaactggagatggcgaccggcgcacgggtgagtaacacgtatccaacctgccgataactcggggatagcctttcgaaagaaagattaatacccgatggtataatcagaccgcatggtcttgttattaaagaatttcggttatcgatggggatgcgttccattaggcagttggtgaggtaacggctcaccaaaccttcgatggataggggttctgagaggaaggtcccccacattggaactgagacacggtccaaactcctacgggaggcagcagtgaggaatattggtcaatgggcgcaggcctgaaccagccaagtagcgtgaaggatgactgccctatgggttgtaaacttcttttatatgggaataaagttttccacgtgtggaattttgtatgtaccatatgaataaggatcggctaactccgtgccagcagccgcggtaatacggaggatccgagcgttatccggatttattgggtttaaagggagcgtaggtggacagttaagtcagttgtgaaagtttgcggctcaaccgtaaaattgcagttgatactggctgtcttgagtacagtagaggtgggcggaattcgtggtgtagcggtgaaatgcttagatatcacgaagaactccgattgcgaaggcagctcactggactgcaactgacactgatgctcgaaagtgtgggtatcaaacaggattagataccctggtagtccacacagtaaacgatgaatactcgctgtttgcgatatacagtaagcggccaagcgaaagcattaagtattccacctggggagtacgccggcaacggtgaaactcaaaggaattgacgggggcccgcacaagcggaggaacatgtggtttaattcgatgatacgcgaggaaccttacccgggcttaaattgcatttgaatatattggaaacagtatagccgtaaggcaaatgtgaaggtgctgcatggttgtcgtcagctcgtgccgtgaggtgtcggcttaagtgccataacgagcgcaacccttatctttagttactaacaggtcatgctgaggactctagagagactgccgtcgtaagatgtgaggaaggtggggatgacgtcaaatcagcacggcccttacgtccggggctacacacgtgttacaatggggggtacagaaggcagctacctggtgacaggatgctaatcccaaaagcctctctcagttcggatcgaagtctgcaacccgacttcgtgaagctggattcgctagtaatcgcgcatcagccatggcgcggtgaatacgttcccgggccttgtacacaccgcccgtcaagccatgaaagccgggggtacctgaagtacgtaaccgcaaggagcgtcctagggtaaaactggtaattggggctaagtcgtaacaaggtagccgtaccggaaggtgcggctggaacatgtggtttccttaaagaagcgtactttgtagtgctcacacagattgtctgatagaaagtgaaaagcaaggcgtttacgcgttgggagtgaggctgaagagaataaggccgttcgctttctattaatgaaagctcaccctacacgaaaatatcacgcaacgcgtgataagcaattttcgtgtccccttcgtctagaggcccaggacaccgccctttcacggcggtaacaggggttcgaatcccctaggggacgccacttgctggtttgtgagtgaaagtcgccgaccttaatatctcaaaactcatcttcgggtgatgtttgagatatttgctctttaaaaatctggatcaagctgaaaattgaaacactgaacaacgagagttgttcgtgagtctctcaaattttcgcaacacgatgatgaatcgaaagaaacatcttcgggttgtgaaagaaagtaagcaagggcgcatggcggatgccttggctctcggaggcgatgaaggacgtgataagctgcgataagctctgggtaggtgcaaataacctttgatccagagatttccgaatgggacaacccggcattctgaaggaatgtcatccatctttgatggaagctaacgcagggaactgaaacatcttagtacctgtaggaaaagaaaataataatgattcccctagtagtggcgagcgaacggggaatagcccaaaccacccatgttacggcatgtgtggggttgtaggaccacgatgtcgcaagacatttgatgagtagaatcctctggaaagttgaaccatagacggtgatagtccggtatacgaagtcaaattaagcgtagtggtatcctgagtagcgcgggacacgagaaatcttgcgtgaatctgccgggaccatccggtaaggctaaatactcccgagagaccgatagcgaaccagtactgtgaaggaaaggtgaaaagcacttcgaatagaagagtgaaatagtccctgaaaccgtgcgcctacaagcggtcggagctgcttaagcagtgacggcgtgccttttgcataatgaacctacgagttactttttccggcaaggttaagcatcttgagatgtgcagccgaagcgaaagcgagtctgaacagggcgtcgagtcggaaggagtagacgcgaaaccaagtgatctacccttggtcaggttgaaggttaggtaacactaactggaggaccgaaccgataagcgttgaaaagcttccggatgaactgagggtgggggtgaaaggctaatcaaacttggagatagctcgtactccccgaaatgcatttaggtgcagccttgtgagttactaatgtgaggtagagcgactgataagatgcgagggcttcaccgcctatcaagtcttgataaactccgaatgcgcattagttctatcacaggagtgagggcatgggtgctaaggtccatgtcctaaaggagaagaatccagaccatcagctaaggtccccaaataaacactaagttgaactaacgaagtcagattgctaagacagctaggatgttggcttggaagcagccattcatttaaagagtgcgtaacagctcactagtcgaggagtttggcgtggataataatcgggcattaagtgttttaccgaagctatgggatcagtaatgatcggtaggggagcattccactctgcgtcgaaggtgaagcgtgagctttgctggagcgtgtggaaaagcaaatgtaggtataagtaacgataaagggggtgagaaaccccctcgccgaaagactaaggtttcctgatcaacgctaatcggatcagggttagtcgggtcctaaggctcagccgaacggtgaggccgatggcagaacaggttaatattcctgtactaccttaaggagtgacgtggagacggagcagtgacagcgccgcggactgacggaatagtccgttgaagggtgtagatgttgatcatcccaggcaaatccgggatgagagtcgaacctgatagtatggagcgttcttcggaacaatccaatagtgcgtgtaagcatactcccaagaaaatccgctaaacttaatccttaaggtacccgtaccgcaaacggacacacgtagtcgggttgaatatactaaggcgcttgagtgattcacggttaaggaactaggcaaattgaccctgtaacttcgggataaagggtcccaacgagagttgggcgcagagaataggtccaggcaactgtttaacaaaaacacagggctgtgccaaattgaaagattacgtatacagcctgacacctgcccggtgctggaaggttaagaggagatgtcatcgcaagagaagcattgaattgaagccccagtaaacggcggccgtaactataacggtcctaaggtagcgaaattccttgtcgggtaagttccgacctgcacgaatggtgtaatgatctggacactgtctcaaccgtgagctcagtgaaattgtagtatcggtgaagatgccgattacccgcgatgggacgaaaagaccccgtgaacctttactatagcttaacattgaatttgggtaattgatgtgtaggataggccggagactttgaagcaggtacgccagtatttgtggagtcgctgttgaaatacggccctttgattatttgagttctaactcgtagttgcgaggacactgtttggtgggtagtttgactggggtggtcgcctccaaaatagtaacggaggcttctaaaggtgccctcaggacgattggtaaccgtccgtagagtgtaatggcataagggcgcttgactgggagactaacaagtcgatcaggtaggaaactagagcatagtgatccggtgtttccgtatggaagggacatcgctcaaaggataaaaggtactccggggataacaggctgatccctcccaagagctcatatcgacggaggggtttggcacctcgatgtcggctcgtcacatcctggggctggagaaggtcccaagggttgggctgttcgcccattaaagtggcacgcgagctgggttcagaacgtcgtgagacagttcggtctctatctatcgtgggcgtatgaaatttgcgtggctctgacactagtacgagaggaccgtgttggactgaccgctggtttaccagttgtgccgccaggtgcattgctgggtatctaagtcgggattggataagtgctgaaagcatctaagtacgaagccagccacaagattagatttcttagggtcgttaaagacgatgacgttgataggatgcaggtgtaaaggtggtaacatcaaagccgagcattactaattgcccgttcactttctttcggacggtgcggatcgcgatacaacgccgaagctgttttggcggatgagagaagattttcagcctgatacagattaaatcagaacgcagaagcggtctgataaaacagaatttattcaggtggttatagcacgagggttccacctcttcccattccgaacagagaagttaagcctcgtcacgccgatggtactgcgtaacagtgggagagtaggtagccgccgtttttcaaataaaacgaaaggctcagtcgaaagactgggcctttcgttttatctgttgtttgtcggtgaacgctctcctgagtaggacaaatccgccgggagcggatttgaacgttgcgaagcaacggcccggagggtggcgggcaggacgcccgccataaactgccaggcatcaaattaagcagaaggccatcctgacggatggcctttttgcgtttctacaaactcttcctgtcgtcatatctacaagccggcgcgccgggaaatgtgcgcggaacccctatttgtttatttttctaaatacattcaaatatgtatccgctcatgagacaataaccctgataaatgcttcaataatattgaaaaaggaagagtatgagtattcaacatttccgtgtcgcccttattcccttttttgcggcattttgccttcctgtttttgctcacccagaaacgctggtgaaagtaaaagatgctgaagatcagttgggtgcacgagtgggttacatcgaactggatctcaacagcggtaagatccttgagagttttcgccccgaagaacgttttccaatgatgagcacttttaaagttctgctatgtggcgcggtattatcccgtgttgacgccgggcaagagcaactcggtcgccgcatacactattctcagaatgacttggttgagtactcaccagtcacagaaaagcatcttacggatggcatgacagtaagagaattatgcagtgctgcaataaccatgagtgataacactgcggccaacttacttctgacaacgatcggaggaccgaaggagctaaccgcttttttgcacaacatgggggatcatgtaactcgccttgatcgttgggaaccggagctgaatgaagccataccaaacgacgagcgtgacaccacgatgcctgcagcaatggcaacaacgttgcgcaaactattaactggcgaactacttactctagcttcccggcaacaattaatagactggatggaggcggataaagttgcaggaccacttctgcgctcggcccttccggctagctggtttattgctgataaatctggagccggtgagcgtgggtctcgcggtatcattgcagcactggggccagatggtaagccctcccgtatcgtagttatctacacgacggggagtcaggcaactatggatgaacgaaatagacagatcgctgagataggtgcctcactgattaagcattggtaactgcagaccaagtttactcatatatactttagattgatttaaaacttcatttttaatttaaaaggatctaggtgaagatcctttttgataatctcatgaccaaaatcccttaacgtgagttttcgttccactgagcgtcagaccccgtagaaaagatcaaaggatcttcttgagatcctttttttctgcgcgtaatctgctgcttgcaaacaaaaaaaccaccgctaccagcggtggtttgtttgccggatcaagagctaccaactctttttccgaaggtaactggcttcagcagagcgcagataccaaatactgtccttctagtgtagccgtagttaggccaccacttcaagaactctgtagcaccgcctacatacctcgctctgctaatcctgttaccagtggctgctgccagtggcgataagtcgtgtcttaccgggttggactcaagacgatagttaccggataaggcgcagcggtcgggctgaacggggggttcgtgcacacagcccagcttggagcgaacgacctacaccgaactgagatacctacagcgtgagctatgagaaagcgccacgcttcccgaagggagaaaggcggacaggtatccggtaagcggcagggtcggaacaggagagcgcacgagggagcttccagggggaaacgcctggtatctttatagtcctgtcgggtttcgccacctctgacttgagcgtcgatttttgtgatgctcgtcaggggggcggagcctatggaaaaacgccagcaacgcggcctttttacggttcctggccttttgctgg

SEQ ID NO: 101 - DNA, 7324 bp, Artificial
  Synthetic
agacttagggaccctgcggccgccattaattcctaatttttgttgacactctatcattgatagagttattttaccactccctatcagtgatagagaaaagtgaaatgaatagaccggccgctgagaaaaagcgaagcggcctttgaaaactgaacaaagaatagacgaaccaaatgtgtagggcgtcttgattcaattcaagacaacaaacatttttaacaagcaagcaatatgctagcaaacaattgagcttaacaatcgcaagattgttctaacttttattatgagagtttgatcctggctcaggacgaacgctggcggcgtgcctaatacatgcaagtcgaacgcttctttcctcccgagtgcttgcactcaattggaaagaggagtggcggacgggtgagtaacacgtgggtaacctacccatcagagggggataacacttggaaacaggtgctaataccgcataacagtttatgccgcatggcataagagtgaaaggcgctttcgggtgtcgctgatggatggacccgcggtgcattagctagttggtgaggtaacggctcaccaaggccacgatgcatagccgacctgagagggtgatcggccacactgggactgagacacggcccagactcctacgggaggcagcagtagggaatcttcggcaatggacgaaagtctgaccgagcaacgccgcgtgagtgaagaaggttttcggatcgtaaaactctgttgttagagaagaacaaggacgttagtaactgaacgtcccctgacggtatctaaccagaaagccacggctaactacgtgccagcagccgcggtaatacgtaggtggcaagcgttgtccggatttattgggcgtaaagcgagcgcaggcggtttcttaagtctgatgtgaaagcccccggctcaaccggggagggtcattggaaactgggagacttgagtgcagaagaggagagtggaattccatgtgtagcggtgaaatgcgtagatatatggaggaacaccagtggcgaaggcggctctctggtctgtaactgacgctgaggctcgaaagcgtggggagcaaacaggattagataccctggtagtccacgccgtaaacgatgagtgctaagtgttggagggtttccgcccttcagtgctgcagcaaacgcattaagcactccgcctggggagtacgaccgcaaggttgaaactcaaaggaattgacgggggcccgcacaagcggtggagcatgtggtttaattcgaagcaacgcgaagaaccttaccaggtcttgacatcctttgaccactctagagatagagctttcccttcggggacaaagtgacaggtggtgcatggttgtcgtcagctcgtgtcgtgagatgttgggttaagtcccgcaacgagcgcaacccttattgttagttgccatcatttagttgggcactctagcgagactgccggtgacaaaccggaggaaggtggggatgacgtcaaatcatcatgccccttatgacctgggctacacacgtgctacaatgggaagtacaacgagtcgctagaccgcgaggtcatgcaaatctcttaaagcttctctcagttcggattgcaggctgcaactcgcctgcatgaagccggaatcgctagtaatcgcggatcagcacgccgcggtgaatacgttcccgggccttgtacacaccgcccgtcacaccacgagagtttgtaacacccgaagtcggtgaggtaacctttttggagccagccgcctaaggtgggatagatgattggggtgaagtcgtaacaaggtagccgtatcggaaggtgcggctggatcatgtggtttctaaggaatattacggaaatacacatttcgtctttactttgttcagttttgagaggtctactctcaatcaaataaattcggggccttagctcagctgggagagcgcctgctttgcacgcaggaggtcagcggttcgatcccgctaggctccattgatagcttttgctatcagattcgttcattgaaaactggatattgaagtaaaaagaatcaaaacaaaccgagaacaccgcgttgaatgagttttttataagttcaattgcttatttattgattaaccttctatcgctagaagaagtgattaagacccaaccgtaaggttgataaggttaagtgaataagggcgcacggtggatgccttggcactaggagccgatgaaggacgggactaacaccgatatgctttggggagctgtaagtaagctatgatccagagatttccgaatgggggaacccaatatcttttataggatattacttttcagtgaatacatagctgattagaggtagacgcagagaactgaaacatcttagtacctgcaggaagagaaagaaaattcgattccctgagtagcggcgagcgaaacgggaagagcccaaaccaacaagcttgcttgttggggttgtaggactccaatatggtagtctgttagtatagttgaaggatttggaaaattccgctaaagagggtgaaagccccgtagacgaaatgctgacaacacctaggaggatcctgagtacggcggaacacgagaaattccgtcggaatccgcggggaccatcccgcaaggctaaatactccctagtgaccgatagtgaaccagtaccgtgagggaaaggtgaaaagcaccccggaaggggagtgaaatagatcctgaaaccgtgtgcctacaacaagtcaaagctcgttaatgagtgatggcgtgccttttgtagaatgaaccggcgagttacgattgcatgcgaggttaagtcgaagagacggagccgcagcgaaagcgagtctgaatagggcgaatgagtatgtagtcgtagacccgaaaccatgtgatctacccatgtccaggttgaaggtgcggtaaaacgcactggaggaccgaacccacgtacgttgaaaagtgcggggatgaggtgtgggtagcggagaaattccaaacgaacttggagatagctggttctctccgaaatagctttagggctagcctcggaattgagaatgatggaggtagagcactgtttggactaggggcccatctcgggttaccgaattcagataaactccgaatgccattcatttatatccgggagtcagactgcgagtgataagatccgtagtcgaaagggaaacagcccagaccaccagctaaggtcccaaaatatatgttaagtggaaaaggatgtggggttgcacagacaactaggatgttggcttagaagcagccaccatttaaagagtgcgtaatagctcactagtcgagtgaccctgcgccgaaaatgtaccggggctaaacatattaccgaagctgtggactacaccattaggtgtagtggtaggagagcgttctaagggcgttgaaggtcgatcgtgaggacggctggagcgcttagaagtgagaatgccggtatgagtagcgaaagacaggtgagaatcctgtccaccgtatgactaaggtttcctggggaaggctcgtccgcccagggttagtcgggacctaagccgaggccgataggcgtaggcgatggacaacaggttgatattcctgtaccagttgtttttgtttgaacaatggagggacgcagtaggctaaggaatgcatgcgattggaagtgcatgtccaagcaatgagtcttgagtagagttaaatgctttactctttaaggacaagttgtgacggggagcgaaataatagtagcgaagttcctgatgtcacactgccaagaaaagcttctagtgagaaaacaactgcccgtaccgtaaaccgacacaggtagtcgaggagagtatcctaaggtgagcgagcgaactctcgttaaggaactcggcaaaatgaccccgtaacttcgggagaaggggtgctgacttcggtcagccgcagtgaataggcccaagcgactgtttatcaaaaacacaggtctctgcaaaatcgtaagatgaagtataggggctgacgcctgcccggtgctggaaggttaagaggatgggttagcttcggcgaagctcagaattgaagccccagtaaacggcggccgtaactataacggtcctaaggtagcgaaattccttgtcgggtaagttccgacccgcacgaaaggcgtaacgatttgggcactgtctcaacgagagactcggtgaaattttagtacctgtgaagatgcaggttacccgcgacaggacggaaagaccccatggagctttactgtagtttgatattgagtgtttgtaccacatgtacaggataggtaggagccgatgagaccggaacgctagtttcggaggaggcgctggtgggatactacccttgtgttatgaaccctctaacccgcaccactaatcgtggtgggagacagtgtcagatgggcagtttgactggggcggtcgcctcctaaaaggtaacggaggcgcccaaaggttccctcagaatggttggaaatcattcgaagagtgtaaaggcagaagggagcttgactgcgagacctacaagtcgagcagggacgaaagtcgggcttagtgatccggtggttccgcatggaagggccatcgctcaacggataaaagctaccctggggataacaggcttatctcccccaagagtccacatcgacggggaggtttggcacctcgatgtcggctcgtcgcatcctggggctgtagtcggtcccaagggttgggctgttcgcccattaaagcggcacgcgagctgggttcagaacgtcgtgagacagttcggtccctatccgtcgcgggcgttggaaatttgagaggagctgtccttagtacgagaggaccgggatggacttaccgctggtgtaccagttgttctgccaagggcattgctgggtagctatgtagggaagggataaacgctgaaagcatctaagtgtgaagcccacctcaagatgagatttcccatttctttaagaaagtaagacccctgagagatgatcaggtagataggttggaagtggaaggctagtgatagttggagcggaccaatactaatcggtcgaggacttaaccaaagaatggataagtaaaagcaacttggttattttgattcaaacttcaatccagttttgagtgaatgaagattcaactcaataagaaacaacacccagtgtggtggcgatagcgagaaggatacacctgttcccatgccgaacacagaagttaagcttcttagcgccgattgtagtgaagggtttccctttgtgagagtaggacgtcgccacgcgattattccggcatagctcagttggtagtagcgcatgactgttaatcatgatgtcgtaggttcgagtcctactgccggagttgagcaaaagcaaaaaccaacttggtttttgctttttttgttttattcactattttttgataagcttgaagaagggactttaaaaacatttataagattaaaaggatcctaccgaagaatgaatacatcaaattttagctatggtataatgtgtttattatagttgcgcgccgggaaatgtgcgcggaacccctatttgtttatttttctaaatacattcaaatatgtatccgctcatgagacaataaccctgataaatgcttcaataatattgaaaaaggaagagtatgagtattcaacatttccgtgtcgcccttattcccttttttgcggcattttgccttcctgtttttgctcacccagaaacgctggtgaaagtaaaagatgctgaagatcagttgggtgcacgagtgggttacatcgaactggatctcaacagcggtaagatccttgagagttttcgccccgaagaacgttttccaatgatgagcacttttaaagttctgctatgtggcgcggtattatcccgtgttgacgccgggcaagagcaactcggtcgccgcatacactattctcagaatgacttggttgagtactcaccagtcacagaaaagcatcttacggatggcatgacagtaagagaattatgcagtgctgcaataaccatgagtgataacactgcggccaacttacttctgacaacgatcggaggaccgaaggagctaaccgcttttttgcacaacatgggggatcatgtaactcgccttgatcgttgggaaccggagctgaatgaagccataccaaacgacgagcgtgacaccacgatgcctgcagcaatggcaacaacgttgcgcaaactattaactggcgaactacttactctagcttcccggcaacaattaatagactggatggaggcggataaagttgcaggaccacttctgcgctcggcccttccggctagctggtttattgctgataaatctggagccggtgagcgtgggtctcgcggtatcattgcagcactggggccagatggtaagccctcccgtatcgtagttatctacacgacggggagtcaggcaactatggatgaacgaaatagacagatcgctgagataggtgcctcactgattaagcattggtaactgcagaccaagtttactcatatatactttagattgatttaaaacttcatttttaatttaaaaggatctaggtgaagatcctttttgataatctcatgaccaaaatcccttaacgtgagttttcgttccactgagcgtcagaccccgtagaaaagatcaaaggatcttcttgagatcctttttttctgcgcgtaatctgctgcttgcaaacaaaaaaaccaccgctaccagcggtggtttgtttgccggatcaagagctaccaactctttttccgaaggtaactggcttcagcagagcgcagataccaaatactgtccttctagtgtagccgtagttaggccaccacttcaagaactctgtagcaccgcctacatacctcgctctgctaatcctgttaccagtggctgctgccagtggcgataagtcgtgtcttaccgggttggactcaagacgatagttaccggataaggcgcagcggtcgggctgaacggggggttcgtgcacacagcccagcttggagcgaacgacctacaccgaactgagatacctacagcgtgagctatgagaaagcgccacgcttcccgaagggagaaaggcggacaggtatccggtaagcggcagggtcggaacaggagagcgcacgagggagcttccagggggaaacgcctggtatctttatagtcctgtcgggtttcgccacctctgacttgagcgtcgatttttgtgatgctcgtcaggggggcggagcctatggaaaaacgccagcaacgcggcctttttacggttcctggccttttgctgg

SEQ ID NO: 102 - DNA, 7162 bp, Artificial
  Synthetic
agacttagggaccctgcggccgccattaattcctaatttttgttgacactctatcattgatagagttattttaccactccctatcagtgatagagaaaagtgaaatgaatagaccggccgctgagaaaaagcgaagcggccctttgaaaactgaacaaagtaagacaaaccaaatgtgtagggcgtcttgattcaattcaagacaacaaacattttttaacaagcaagcaatatgctagcaaacaaattgagcttaacaatcgcaagattgttcgaactttttatgagagtttgatcctggctcaggacgaacgctggcggcgtgcctaatacatgcaagtcgaacgcttctttttccaccggagcttgctccaccggaaaaagaggagtggcgaacgggtgagtaacacgtgggtaacctgcccatcagaaggggataacacttggaaacaggtgctaataccgtataacaatcgaaaccgcatggttttgatttgaaaggcgctttcgggtgtcgctgatggatggacccgcggtgcattagctagttggtgaggtaacggctcaccaaggccacgatgcatagccgacctgagagggtgatcggccacattgggactgagacacggcccaaactcctacgggaggcagcagtagggaatcttcggcaatggacgaaagtctgaccgagcaacgccgcgtgagtgaagaaggttttcggatcgtaaaactctgttgttagagaagaacaaggatgagagtaactgttcatcccttgacggtatctaaccagaaagccacggctaactacgtgccagcagccgcggtaatacgtaggtggcaagcgttgtccggatttattgggcgtaaagcgagcgcaggcggtttcttaagtctgatgtgaaagcccccggctcaaccggggagggtcattggaaactgggagacttgagtgcagaagaggagagtggaattccatgtgtagcggtgaaatgcgtagatatatggaggaacaccagtggcgaaggcggctctctggtctgtaactgacgctgaggctcgaaagcgtggggagcaaacaggattagataccctggtagtccacgccgtaaacgatgagtgctaagtgttggagggtttccgcccttcagtgctgcagctaacgcattaagcactccgcctggggagtacgaccgcaaggttgaaactcaaaggaattgacgggggcccgcacaagcggtggagcatgtggtttaattcgaagcaacgcgaagaaccttaccaggtcttgacatcctttgaccactctagagatagagcttccccttcgggggcaaagtgacaggtggtgcatggttgtcgtcagctcgtgtcgtgagatgttgggttaagtcccgcaacgagcgcaacccttattgttagttgccatcattcagttgggcactctagcaagactgccggtgacaaaccggaggaaggtggggatgacgtcaaatcatcatgccccttatgacctgggctacacacgtgctacaatgggaagtacaacgagttgcgaagtcgcgaggctaagctaatctcttaaagcttctctcagttcggattgcaggctgcaactcgcctgcatgaagccggaatcgctagtaatcgcggatcagcacgccgcggtgaatacgttcccgggccttgtacacaccgcccgtcacaccacgagagtttgtaacacccgaagtcggtgaggtaaccttttggagccagtcgcctaaggtgggatagatgattggggtgaagtcgtaacaaggtagccgtatcggaaggtgcggctggatcatgtggtttctaaggaatattacggagactacacaatttgtttttactttgttcagttttgagaggtttactctcaaacacttttgttcattgaaaactggatatttgaagtaaatgtaagtaatacaaaccgagaacaccgcgttgaatttgaaagctgaacaaattgtttagcctgaagcaaaataggcggacggccataaaatctttgattttatgagacgatcgatctttttgccgtacaggctgatttgtgagctggatagagttttttaataagttcaattgcttattttcttgatctaacttctatcgctagaagaaggatcaaaacccaaccgtaaggttgataaggttaagtgaataagggcgcacggtggatgccttggcactaggagccgatgaaggacgggactaacaccgatatgctttggggagctgtacgtaagctatgatccagagatttccgaatgggggaacccaacatctttaataggatgttacgattgtgtgaatacatagcacattcgaggtagacgcagagaactgaaacatctaagtacctgcaggaagagaaagaaaattcgattccctgagtagcggcgagcgaaacgggaaaagcccaaaccagcaagcttgcttgttggggttgtaggactccaatatggtagttctttcagatagtcgaatgacttggaaaagtcagtcaaagagggtaaaaaccccgtagacgaaatgtggaagacacctaggaggatcctgagtacggcggaacacgagaaattccgtcggaatccgggaggaccatctcccaaggctaaatactccctagtgaccgatagtgaaccagtaccgtgagggaaaggtgaaaagcaccccggaaggggagtgaaatagaacctgaaaccgtgtgcctacaacaagtcaaagcccgttaatgggtgatggcgtgccttttgtagaatgaaccggcgagttacgattgcatgcgaggttaagttgaagagacggagccgcagcgaaagcgagtctgaatagggcgtttgagtatgtagtcgtagacccgaaaccatgtgatctacccatgtccaggttgaaggtgcggtaaaacgcactggaggaccgaacccacgtacgttgaaaagtgcggggatgaggtgtgggtagcggagaaattccaaacgaacttggagatagctggttctctccgaaatagctttagggctagcctcggaattgagaatgatggaggtagagcactgtttggactaggggcccatctcgggttaccgaattcagataaactccgaatgccattcattcatatccgggagtcagactgtgagtgataagatccatagtcgaaagggaaacagcccagaccaccagctaaggtcccaaaatatatgttaagtggaaaaggatgtggggttgcacagacaactaggatgttggcttagaagcagccaccatttaaagagtgcgtaatagctcactagtcgagtgaccctgcgccgaaaatgtaccggggctaaacatattaccgaagctgtggagtacacctttaggtgtattggtaggagagcgttctaagggcgttgaaggcagatcgtgaggactgctggagcgcttagaagtgagaatgccggtatgagtagcgaaagacaggtgagaatcctgtccaccgaatgactaaggtttcctggggaaggctcgtccgcccagggttagtcgggacctaagccgaggccgacaggcgtaggcgatggataacaggttgatattcctgtacccgttgtttttgtttgagcaatggagggacgcaggaggctaaggaatgcagacgatcggaaatgtctgtccaagcagtaagtctgaagaggagtcaaatgcttcttttcttaaggacaagctgtgatggggagggaaataatagtaccgaagttcctgatgtcacactgccgagaaaagcttctagtgagaaaacagcggcccgtaccgcaaaccgacacaggtagtcgaggagagaatcctaaggtgagcgagagaactctcgttaaggaactcggcaaaatgaccccgtaacttcgggagaaggggtgctgatcatacgatcagccgcagtgaataggcccaagcgactgtttatcaaaaacacaggtctctgcaaaatcgtaagatgaagtataggggctgacgcctgcccggtgctggaaggttaagaggagtgcttagcgcaagcgaaggtacgaattgaagccccagtaaacggcggccgtaactataacggtcctaaggtagcgaaattccttgtcgggtaagttccgacccgcacgaaaggcgtaacgatttgggcactgtctcaacgagagactcggtgaaattttagtacctgtgaagatgcaggttacccgcgacaggacggaaagaccccatggagctttactgtagtttgatattgagtgtctgtaccgcatgtacaggataggtaggagccgtagaaatcggaacgctagtttcgatggaggcgctggtgggatactacccctgcgttatggccactctaacccgcaccactaatcgtggtgggagacagtgtcagatgggcagtttgactggggcggtcgcctcctaaaaggtaacggaggcgcccaaaggttccctcagaatggttggaaatcattcgaagagtgtaaaggcagaagggagcttgactgcgagaccaacaagtcgagcagggacgaaagtcgggcttagtgatccggtggttccgcatggaagggccatcgctcaacggataaaagctaccctggggataacaggcttatctcccccaagagtccacatcgacggggaggtttggcacctcgatgtcggctcgtcgcatcctggggctgtagtcggtcccaagggttgggctgttcgcccattaaagcggcacgcgagctgggttcagaacgtcgtgagacagttcggtccctatccgtcgcgggcgttggaaatttgagaggagctgtccttagtacgagaggaccgggatggacttaccgctggtgtaccagttgttctgccaagggcattgctgggtagctatgtagggaagggataaacgctgaaagcatctaagtgtgaagcccacctcaagatgagatttcccatttctttaagaaagtaagatccctgagagatgatcaggtagataggtcaggagtggaagtacagtgatgtatggagcggactgatactaatcgatcgaggacttaaccaataggttaaaagaaaagaactcggaaaaaaacttatatgacttcaaatccagttttgagtgaacaaaatttactcaataaaagataacaccacagtgtggtggcgatagcgagaaggatacacctgtaaccatgccgaacacagaagttaagcttcttagcgccgattgtagtgaggggttgccccttgtgagagtaggacgtcgccacgcaaaggcaaaaagatgaactagaaatagttcatctttttttatttttattaagttaaagaacggattcagcgcgccgggaaatgtgcgcggaacccctatttgtttatttttctaaatacattcaaatatgtatccgctcatgagacaataaccctgataaatgcttcaataatattgaaaaaggaagagtatgagtattcaacatttccgtgtcgcccttattcccttttttgcggcattttgccttcctgtttttgctcacccagaaacgctggtgaaagtaaaagatgctgaagatcagttgggtgcacgagtgggttacatcgaactggatctcaacagcggtaagatccttgagagttttcgccccgaagaacgttttccaatgatgagcacttttaaagttctgctatgtggcgcggtattatcccgtgttgacgccgggcaagagcaactcggtcgccgcatacactattctcagaatgacttggttgagtactcaccagtcacagaaaagcatcttacggatggcatgacagtaagagaattatgcagtgctgcaataaccatgagtgataacactgcggccaacttacttctgacaacgatcggaggaccgaaggagctaaccgcttttttgcacaacatgggggatcatgtaactcgccttgatcgttgggaaccggagctgaatgaagccataccaaacgacgagcgtgacaccacgatgcctgcagcaatggcaacaacgttgcgcaaactattaactggcgaactacttactctagcttcccggcaacaattaatagactggatggaggcggataaagttgcaggaccacttctgcgctcggcccttccggctagctggtttattgctgataaatctggagccggtgagcgtgggtctcgcggtatcattgcagcactggggccagatggtaagccctcccgtatcgtagttatctacacgacggggagtcaggcaactatggatgaacgaaatagacagatcgctgagataggtgcctcactgattaagcattggtaactgcagaccaagtttactcatatatactttagattgatttaaaacttcatttttaatttaaaaggatctaggtgaagatcctttttgataatctcatgaccaaaatcccttaacgtgagttttcgttccactgagcgtcagaccccgtagaaaagatcaaaggatcttcttgagatcctttttttctgcgcgtaatctgctgcttgcaaacaaaaaaaccaccgctaccagcggtggtttgtttgccggatcaagagctaccaactctttttccgaaggtaactggcttcagcagagcgcagataccaaatactgtccttctagtgtagccgtagttaggccaccacttcaagaactctgtagcaccgcctacatacctcgctctgctaatcctgttaccagtggctgctgccagtggcgataagtcgtgtcttaccgggttggactcaagacgatagttaccggataaggcgcagcggtcgggctgaacggggggttcgtgcacacagcccagcttggagcgaacgacctacaccgaactgagatacctacagcgtgagctatgagaaagcgccacgcttcccgaagggagaaaggcggacaggtatccggtaagcggcagggtcggaacaggagagcgcacgagggagcttccagggggaaacgcctggtatctttatagtcctgtcgggtttcgccacctctgacttgagcgtcgatttttgtgatgctcgtcaggggggcggagcctatggaaaaacgccagcaacgcggcctttttacggttcctggccttttgctgg

SEQ ID NO: 103 - DNA, 7447 bp, Artificial
  Synthetic
agacttagggaccctgcggccgccattaattcctaatttttgttgacactctatcattgatagagttattttaccactccctatcagtgatagagaaaagtgaaatgaatagaccggccgctgagaaaaagcgaagcggcactgctctttaacaatttatcagacaatctgtgtgggcactcgaagatacggattcttaacgtcgcaagacgaaaaatgaataccaagtctcaagagtgaacacgtaattcattacgaagtttaattctttgagcgtcaaacttttttttatgagagtttgatcctggctcaggacgaacgctggcggcgtgcctaatacatgcaagtcgaacgcttctttttccaccggagcttgctccaccggaaaaagaggagtggcgaacgggtgagtaacacgtgggtaacctgcccatcagaaggggataacacttggaaacaggtgctaataccgtataacaatcgaaaccgcatggttttgatttgaaaggcgctttcgggtgtcgctgatggatggacccgcggtgcattagctagttggtgaggtaacggctcaccaaggccacgatgcatagccgacctgagagggtgatcggccacattgggactgagacacggcccaaactcctacgggaggcagcagtagggaatcttcggcaatggacgaaagtctgaccgagcaacgccgcgtgagtgaagaaggttttcggatcgtaaaactctgttgttagagaagaacaaggatgagagtaactgttcatcccttgacggtatctaaccagaaagccacggctaactacgtgccagcagccgcggtaatacgtaggtggcaagcgttgtccggatttattgggcgtaaagcgagcgcaggcggtttcttaagtctgatgtgaaagcccccggctcaaccggggagggtcattggaaactgggagacttgagtgcagaagaggagagtggaattccatgtgtagcggtgaaatgcgtagatatatggaggaacaccagtggcgaaggcggctctctggtctgtaactgacgctgaggctcgaaagcgtggggagcaaacaggattagataccctggtagtccacgccgtaaacgatgagtgctaagtgttggagggtttccgcccttcagtgctgcagctaacgcattaagcactccgcctggggagtacgaccgcaaggttgaaactcaaaggaattgacgggggcccgcacaagcggtggagcatgtggtttaattcgaagcaacgcgaagaaccttaccaggtcttgacatcctttgaccactctagagatagagcttccccttcgggggcaaagtgacaggtggtgcatggttgtcgtcagctcgtgtcgtgagatgttgggttaagtcccgcaacgagcgcaacccttattgttagttgccatcattcagttgggcactctagcaagactgccggtgacaaaccggaggaaggtggggatgacgtcaaatcatcatgccccttatgacctgggctacacacgtgctacaatgggaagtacaacgagttgcgaagtcgcgaggctaagctaatctcttaaagcttctctcagttcggattgcaggctgcaactcgcctgcatgaagccggaatcgctagtaatcgcggatcagcacgccgcggtgaatacgttcccgggccttgtacacaccgcccgtcacaccacgagagtttgtaacacccgaagtcggtgaggtaaccttttggagccagtcgcctaaggtgggatagatgattggggtgaagtcgtaacaaggtagccgtatcggaaggtgcggctggatcatgtggtttccttaaagaagcgtactttgtagtgctcacacagattgtctgatagaaagtgaaaagcaaggcgtttacgcgttgggagtgaggctgaagagaataaggccgttcgctttctattaatgaaagctcaccctacacgaaaatatcacgcaacgcgtgataagcaattttcgtgtccccttcgtctagaggcccaggacaccgccctttcacggcggtaacaggggttcgaatcccctaggggacgccacttgctggtttgtgagtgaaagtcgccgaccttaatatctcaaaactcatcttcgggtgatgtttgagatatttgctctttaaaaatctggatcaagctgaaaattgaaacactgaacaacgagagttgttcgtgagtctctcaaattttcgcaacacgatgatgaatcgaaagaaacatcttcgggttgtgaggttaagtgaataagggcgcacggtggatgccttggcactaggagccgatgaaggacgggactaacaccgatatgctttggggagctgtacgtaagctatgatccagagatttccgaatgggggaacccaacatctttaataggatgttacgattgtgtgaatacatagcacattcgaggtagacgcagagaactgaaacatctaagtacctgcaggaagagaaagaaaattcgattccctgagtagcggcgagcgaaacgggaaaagcccaaaccagcaagcttgcttgttggggttgtaggactccaatatggtagttctttcagatagtcgaatgacttggaaaagtcagtcaaagagggtaaaaaccccgtagacgaaatgtggaagacacctaggaggatcctgagtacggcggaacacgagaaattccgtcggaatccgggaggaccatctcccaaggctaaatactccctagtgaccgatagtgaaccagtaccgtgagggaaaggtgaaaagcaccccggaaggggagtgaaatagaacctgaaaccgtgtgcctacaacaagtcaaagcccgttaatgggtgatggcgtgccttttgtagaatgaaccggcgagttacgattgcatgcgaggttaagttgaagagacggagccgcagcgaaagcgagtctgaatagggcgtttgagtatgtagtcgtagacccgaaaccatgtgatctacccatgtccaggttgaaggtgcggtaaaacgcactggaggaccgaacccacgtacgttgaaaagtgcggggatgaggtgtgggtagcggagaaattccaaacgaacttggagatagctggttctctccgaaatagctttagggctagcctcggaattgagaatgatggaggtagagcactgtttggactaggggcccatctcgggttaccgaattcagataaactccgaatgccattcattcatatccgggagtcagactgtgagtgataagatccatagtcgaaagggaaacagcccagaccaccagctaaggtcccaaaatatatgttaagtggaaaaggatgtggggttgcacagacaactaggatgttggcttagaagcagccaccatttaaagagtgcgtaatagctcactagtcgagtgaccctgcgccgaaaatgtaccggggctaaacatattaccgaagctgtggagtacacctttaggtgtattggtaggagagcgttctaagggcgttgaaggcagatcgtgaggactgctggagcgcttagaagtgagaatgccggtatgagtagcgaaagacaggtgagaatcctgtccaccgaatgactaaggtttcctggggaaggctcgtccgcccagggttagtcgggacctaagccgaggccgacaggcgtaggcgatggataacaggttgatattcctgtacccgttgtttttgtttgagcaatggagggacgcaggaggctaaggaatgcagacgatcggaaatgtctgtccaagcagtaagtctgaagaggagtcaaatgcttcttttcttaaggacaagctgtgatggggagggaaataatagtaccgaagttcctgatgtcacactgccgagaaaagcttctagtgagaaaacagcggcccgtaccgcaaaccgacacaggtagtcgaggagagaatcctaaggtgagcgagagaactctcgttaaggaactcggcaaaatgaccccgtaacttcgggagaaggggtgctgatcatacgatcagccgcagtgaataggcccaagcgactgtttatcaaaaacacaggtctctgcaaaatcgtaagatgaagtataggggctgacgcctgcccggtgctggaaggttaagaggagtgcttagcgcaagcgaaggtacgaattgaagccccagtaaacggcggccgtaactataacggtcctaaggtagcgaaattccttgtcgggtaagttccgacccgcacgaaaggcgtaacgatttgggcactgtctcaacgagagactcggtgaaattttagtacctgtgaagatgcaggttacccgcgacaggacggaaagaccccatggagctttactgtagtttgatattgagtgtctgtaccgcatgtacaggataggtaggagccgtagaaatcggaacgctagtttcgatggaggcgctggtgggatactacccctgcgttatggccactctaacccgcaccactaatcgtggtgggagacagtgtcagatgggcagtttgactggggcggtcgcctcctaaaaggtaacggaggcgcccaaaggttccctcagaatggttggaaatcattcgaagagtgtaaaggcagaagggagcttgactgcgagaccaacaagtcgagcagggacgaaagtcgggcttagtgatccggtggttccgcatggaagggccatcgctcaacggataaaagctaccctggggataacaggcttatctcccccaagagtccacatcgacggggaggtttggcacctcgatgtcggctcgtcgcatcctggggctgtagtcggtcccaagggttgggctgttcgcccattaaagcggcacgcgagctgggttcagaacgtcgtgagacagttcggtccctatccgtcgcgggcgttggaaatttgagaggagctgtccttagtacgagaggaccgggatggacttaccgctggtgtaccagttgttctgccaagggcattgctgggtagctatgtagggaagggataaacgctgaaagcatctaagtgtgaagcccacctcaagatgagatttcccatttctttaagaaagtaagatccctgagagatgatcaggtagataggtcaggagtggaagtacagtgatgtatggagcggactgatactaatcgatcgaggacttaaccaaacaacgccgaagctgttttggcggatgagagaagattttcagcctgatacagattaaatcagaacgcagaagcggtctgataaaacagaattagtgtggtggcgatagcgagaaggatacacctgtaaccatgccgaacacagaagttaagcttcttagcgccgattgtagtgaggggttgccccttgtgagagtaggacgtcgccacgcaacaaataaaacgaaaggctcagtcgaaagactgggcctttagttttatctgttgtttgtcggtgaacgctctcctgagtaggacaaatccgccgggagcggatttgaacgttgcgaagcaacggcccggagggtggcgggcaggacgcccgccataaactgccaggcatcaaattaagcagaaggccatcctgacggatggcctttttgcgtttctacaaactcttcctgtcgtcatatctacaagccggcgcgccgggaaatgtgcgcggaacccctatttgtttatttttctaaatacattcaaatatgtatccgctcatgagacaataaccctgataaatgcttcaataatattgaaaaaggaagagtatgagtattcaacatttccgtgtcgcccttattcccttttttgcggcattttgccttcctgtttttgctcacccagaaacgctggtgaaagtaaaagatgctgaagatcagttgggtgcacgagtgggttacatcgaactggatctcaacagcggtaagatccttgagagttttcgccccgaagaacgttttccaatgatgagcacttttaaagttctgctatgtggcgcggtattatcccgtgttgacgccgggcaagagcaactcggtcgccgcatacactattctcagaatgacttggttgagtactcaccagtcacagaaaagcatcttacggatggcatgacagtaagagaattatgcagtgctgcaataaccatgagtgataacactgcggccaacttacttctgacaacgatcggaggaccgaaggagctaaccgcttttttgcacaacatgggggatcatgtaactcgccttgatcgttgggaaccggagctgaatgaagccataccaaacgacgagcgtgacaccacgatgcctgcagcaatggcaacaacgttgcgcaaactattaactggcgaactacttactctagcttcccggcaacaattaatagactggatggaggcggataaagttgcaggaccacttctgcgctcggcccttccggctagctggtttattgctgataaatctggagccggtgagcgtgggtctcgcggtatcattgcagcactggggccagatggtaagccctcccgtatcgtagttatctacacgacggggagtcaggcaactatggatgaacgaaatagacagatcgctgagataggtgcctcactgattaagcattggtaactgcagaccaagtttactcatatatactttagattgatttaaaacttcatttttaatttaaaaggatctaggtgaagatcctttttgataatctcatgaccaaaatcccttaacgtgagttttcgttccactgagcgtcagaccccgtagaaaagatcaaaggatcttcttgagatcctttttttctgcgcgtaatctgctgcttgcaaacaaaaaaaccaccgctaccagcggtggtttgtttgccggatcaagagctaccaactctttttccgaaggtaactggcttcagcagagcgcagataccaaatactgtccttctagtgtagccgtagttaggccaccacttcaagaactctgtagcaccgcctacatacctcgctctgctaatcctgttaccagtggctgctgccagtggcgataagtcgtgtcttaccgggttggactcaagacgatagttaccggataaggcgcagcggtcgggctgaacggggggttcgtgcacacagcccagcttggagcgaacgacctacaccgaactgagatacctacagcgtgagctatgagaaagcgccacgcttcccgaagggagaaaggcggacaggtatccggtaagcggcagggtcggaacaggagagcgcacgagggagcttccagggggaaacgcctggtatctttatagtcctgtcgggtttcgccacctctgacttgagcgtcgatttttgtgatgctcgtcaggggggcggagcctatggaaaaacgccagcaacgcggcctttttacggttcctggccttttgctgg

SEQ ID NO: 104 - DNA, 7409 bp, Artificial
  Synthetic
agacttagggaccctgcggccgccattaattcctaatttttgttgacactctatcattgatagagttattttaccactccctatcagtgatagagaaaagtgaaatgaatagaccggccgctgagaaaaagcgaagcggctgttaataaaatgtataattaattcttgtcggtaagaaaaatgaacattgaaaactgaatgacaatatgtcaacgttaattccaaaaaacgtaacgataagttacaaacattatttagtatttatgagctaatcaaacatcataatttttatggagagtttgatcctggctcaggatgaacgctggcggcgtgcctaatacatgcaagtcgagcgaacggacgagaagcttgcttctctgatgttagcggcggacgggtgagtaacacgtggataacctacctataagactgggataacttcgggaaaccggagctaataccggataatattttgaaccgcatggttcaaaagtgaaagacggtcttgctgtcacttatagatggatccgcgctgcattagctagttggtaaggtaacggcttaccaaggcaacgatgcatagccgacctgagagggtgatcggccacactggaactgagacacggtccagactcctacgggaggcagcagtagggaatcttccgcaatgggcgaaagcctgacggagcaacgccgcgtgagtgatgaaggtcttcggatcgtaaaactctgttattagggaagaacatatgtgtaagtaactgtgcacatcttgacggtacctaatcagaaagccacggctaactacgtgccagcagccgcggtaatacgtaggtggcaagcgttatccggaattattgggcgtaaagcgcgcgtaggcggttttttaagtctgatgtgaaagcccacggctcaaccgtggagggtcattggaaactggaaaacttgagtgcagaagaggaaagtggaattccatgtgtagcggtgaaatgcgcagagatatggaggaacaccagtggcgaaggcgactttctggtctgtaactgacgctgatgtgcgaaagcgtggggatcaaacaggattagataccctggtagtccacgccgtaaacgatgagtgctaagtgttagggggtttccgccccttagtgctgcagctaacgcattaagcactccgcctggggagtacgaccgcaaggttgaaactcaaaggaattgacggggacccgcacaagcggtggagcatgtggtttaattcgaagcaacgcgaagaaccttaccaaatcttgacatcctttgacaactctagagatagagccttccccttcgggggacaaagtgacaggtggtgcatggttgtcgtcagctcgtgtcgtgagatgttgggttaagtcccgcaacgagcgcaacccttaagcttagttgccatcattaagttgggcactctaagttgactgccggtgacaaaccggaggaaggtggggatgacgtcaaatcatcatgccccttatgatttgggctacacacgtgctacaatggacaatacaaagggcagcgaaaccgcgaggtcaagcaaatcccataaagttgttctcagttcggattgtagtctgcaactcgactacatgaagctggaatcgctagtaatcgtagatcagcatgctacggtgaatacgttcccgggtcttgtacacaccgcccgtcacaccacgagagtttgtaacacccgaagccggtggagtaaccttttaggagctagccgtcgaaggtgggacaaatgattggggtgaagtcgtaacaaggtagccgtatcggaaggtgcggctggatcatgtggtttctaaggatatattcggaacatcttcttcagaagatgcggaataacgtgacatattgtattcagttttgaatgtttatttaacattcaaataatttttggttaaagtgatattgcttatgcgagcgcttgacaatctattctttttaaagaaagcggttgtcagacaatgcattgagaaaaattaaagcggagtttacttttgtaaatgagcatttgattttttgaaaataaagcagtatgcgagcgcttgactgaaaagaaattgtacattgaaaactagataagtaagtaaaatatagattttaccaagcaaaaccgagtgaataaagagttttaaataagcttgaattcataagaaataatcgctagtgttcgaaagaacactcacaagattaataacgcgtttcctgtaggatggaaacatagattaagttattaagggcgcacggtggatgccttggcactagaagccgatgaaggacgttactaacgacgatatgctttggggagctgtaagtaagctttgatccagagatttccgaatggggaaacccagcatgagttatgtcatgttatcgatatgtgaatacatagcatatcagaaggcacacccggagaactgaaacatcttagtacccggaggaagagaaagaaaattcgattcccttagtagcggcgagcgaaacgggaagagcccaaaccaacaagcttgcttgttggggttgtaggacactctatacggagttacaaaggacgacattagacgaatcatctggaaagatgaatcaaagaaggtaataatcctgtagtcgaaaatgttgtctctcttgagtggatcctgagtacgacggagcacgtgaaattccgtcggaatctgggaggaccatctcctaaggctaaatactctctagtgaccgatagtgaaccagtaccgtgagggaaaggtgaaaagcaccccggaaggggagtgaaatagaacctgaaaccgtgtgcttacaagtagtcagagcccgttaatgggtgatggcgtgccttttgtagaatgaaccggcgagttacgatttgatgcaaggttaagcagtaaatgtggagccgtagcgaaagcgagtctgaatagggcgtttagtatttggtcgtagacccgaaaccaggtgatctacccttggtcaggttgaagttcaggtaacactgaatggaggaccgaaccgacttacgttgaaaagtgagcggatgaactgagggtagcggagaaattccaatcgaacctggagatagctggttctctccgaaatagctttagggctagcctcaagtgatgattattggaggtagagcactgtttggacgaggggcccctctcgggttaccgaattcagacaaactccgaatgccaattaatttaacttgggagtcagaacatgggtgataaggtccgtgttcgaaagggaaacagcccagaccaccagctaaggtcccaaaatatatgttaagtggaaaaggatgtggcgttgcccagacaactaggatgttggcttagaagcagccatcatttaaagagtgcgtaatagctcactagtcgagtgacactgcgccgaaaatgtaccggggctaaacatattaccgaagctgtggattgtcctttggacaatggtaggagagcgttctaagggcgttgaagcatgatcgtaaggacatgtggagcgcttagaagtgagaatgccggtgtgagtagcgaaagacgggtgagaatcccgtccaccgattgactaaggtttccagaggaaggctcgtccgctctgggttagtcgggtcctaagctgaggccgacaggcgtaggcgatggataacaggttgatattcctgtaccacctataatcgttttaatcgatggggggacgcagtaggataggcgaagcgtgcgattggattgcacgtctaagcagtaaggctgagtattaggcaaatccggtactcattaaggctgagctgtgatggggagaagacattgtgtcttcgagtcgttgatttcacactgccgagaaaagcctctagatagaaaataggtgcccgtaccgcaaaccgacacaggtagtcaagatgagaattctaaggtgagcgagcgaactctcgttaaggaactcggcaaaatgaccccgtaacttcgggagaaggggtgctctttagggttaacgcccagaagagccgcagtgaataggcccaagcgactgtttatcaaaaacacaggtctctgctaaaccgtaaggtgatgtataggggctgacgcctgcccggtgctggaaggttaagaggagtggttagcttctgcgaagctacgaatcgaagccccagtaaacggcggccgtaactataacggtcctaaggtagcgaaattccttgtcgggtaagttccgacccgcacgaaaggcgtaacgatttgggcactgtctcaacgagagactcggtgaaatcatagtacctgtgaagatgcaggttacccgcgacaggacggaaagaccccgtggagctttactgtagcctgatattgaaattcggcacagcttgtacaggataggtaggagcctttgaaacgtgagcgctagcttacgtggaggcgctggtgggatactaccctagctgtgttggctttctaacccgcaccacttatcgtggtgggagacagtgtcaggcgggcagtttgactggggcggtcgcctcctaaaaggtaacggaggcgctcaaaggttccctcagaatggttggaaatcattcatagagtgtaaaggcataagggagcttgactgcgagacctacaagtcgagcagggtcgaaagacggacttagtgatccggtggttccgcatggaagggccatcgctcaacggataaaagctaccccggggataacaggcttatctcccccaagagttcacatcgacggggaggtttggcacctcgatgtcggctcatcgcatcctggggctgtagtcggtcccaagggttgggctgttcgcccattaaagcggtacgcgagctgggttcagaacgtcgtgagacagttcggtccctatccgtcgtgggcgtaggaaatttgagaggagctgtccttagtacgagaggaccgggatggacatacctctggtgtaccagttgtcgtgccaacggcatagctgggtagctatgtgtggacgggataagtgctgaaagcatctaagcatgaagcccccctcaagatgagatttcccaacttcggttataagatccctcaaagatgatgaggttaataggttcgaggtggaagcatggtgacatgtggagctgacgaatactaatcgatcgaagacttaatcaaaataaatgttttgcgaagcaaaatcacttttacttactatctagttttgaatgtataatctacattcatatgtctggtgactatagcaaggaggtcacacctgttcccatgccgaacacagaagttaagctccttagcgtcgatggtagtcgaacttacgttccgctagagtagaacgttgccaggcaaaaaaatggatgcgatgagccgcattgagaccgcaaggtctcttttttttatgtctaaaacgttgaaataaaggttaacacaaagaaagatggcttggcgaagtgtgaaattgataatttaataatgtgcacttttgattgtttaaatctgtgactagaagtataagcgaagacattcagaagtattataaaaagtgaacagcagtaagatagtttttaatcataaatcatcttactgctgtttttaggcgcgccgggaaatgtgcgcggaacccctatttgtttatttttctaaatacattcaaatatgtatccgctcatgagacaataaccctgataaatgcttcaataatattgaaaaaggaagagtatgagtattcaacatttccgtgtcgcccttattcccttttttgcggcattttgccttcctgtttttgctcacccagaaacgctggtgaaagtaaaagatgctgaagatcagttgggtgcacgagtgggttacatcgaactggatctcaacagcggtaagatccttgagagttttcgccccgaagaacgttttccaatgatgagcacttttaaagttctgctatgtggcgcggtattatcccgtgttgacgccgggcaagagcaactcggtcgccgcatacactattctcagaatgacttggttgagtactcaccagtcacagaaaagcatcttacggatggcatgacagtaagagaattatgcagtgctgcaataaccatgagtgataacactgcggccaacttacttctgacaacgatcggaggaccgaaggagctaaccgcttttttgcacaacatgggggatcatgtaactcgccttgatcgttgggaaccggagctgaatgaagccataccaaacgacgagcgtgacaccacgatgcctgcagcaatggcaacaacgttgcgcaaactattaactggcgaactacttactctagcttcccggcaacaattaatagactggatggaggcggataaagttgcaggaccacttctgcgctcggcccttccggctagctggtttattgctgataaatctggagccggtgagcgtgggtctcgcggtatcattgcagcactggggccagatggtaagccctcccgtatcgtagttatctacacgacggggagtcaggcaactatggatgaacgaaatagacagatcgctgagataggtgcctcactgattaagcattggtaactgcagaccaagtttactcatatatactttagattgatttaaaacttcatttttaatttaaaaggatctaggtgaagatcctttttgataatctcatgaccaaaatcccttaacgtgagttttcgttccactgagcgtcagaccccgtagaaaagatcaaaggatcttcttgagatcctttttttctgcgcgtaatctgctgcttgcaaacaaaaaaaccaccgctaccagcggtggtttgtttgccggatcaagagctaccaactctttttccgaaggtaactggcttcagcagagcgcagataccaaatactgtccttctagtgtagccgtagttaggccaccacttcaagaactctgtagcaccgcctacatacctcgctctgctaatcctgttaccagtggctgctgccagtggcgataagtcgtgtcttaccgggttggactcaagacgatagttaccggataaggcgcagcggtcgggctgaacggggggttcgtgcacacagcccagcttggagcgaacgacctacaccgaactgagatacctacagcgtgagctatgagaaagcgccacgcttcccgaagggagaaaggcggacaggtatccggtaagcggcagggtcggaacaggagagcgcacgagggagcttccagggggaaacgcctggtatctttatagtcctgtcgggtttcgccacctctgacttgagcgtcgatttttgtgatgctcgtcaggggggcggagcctatggaaaaacgccagcaacgcggcctttttacggttcctggccttttgctgg

SEQ ID NO: 105 - DNA, 7446 bp, Artificial
  Synthetic
agacttagggaccctgcggccgccattaattcctaatttttgttgacactctatcattgatagagttattttaccactccctatcagtgatagagaaaagtgaaatgaatagaccggccgctgagaaaaagcgaagcggcactgctctttaacaatttatcagacaatctgtgtgggcactcgaagatacggattcttaacgtcgcaagacgaaaaatgaataccaagtctcaagagtgaacacgtaattcattacgaagtttaattctttgagcgtcaaactttttttatggagagtttgatcctggctcaggatgaacgctggcggcgtgcctaatacatgcaagtcgagcgaacggacgagaagcttgcttctctgatgttagcggcggacgggtgagtaacacgtggataacctacctataagactgggataacttcgggaaaccggagctaataccggataatattttgaaccgcatggttcaaaagtgaaagacggtcttgctgtcacttatagatggatccgcgctgcattagctagttggtaaggtaacggcttaccaaggcaacgatgcatagccgacctgagagggtgatcggccacactggaactgagacacggtccagactcctacgggaggcagcagtagggaatcttccgcaatgggcgaaagcctgacggagcaacgccgcgtgagtgatgaaggtcttcggatcgtaaaactctgttattagggaagaacatatgtgtaagtaactgtgcacatcttgacggtacctaatcagaaagccacggctaactacgtgccagcagccgcggtaatacgtaggtggcaagcgttatccggaattattgggcgtaaagcgcgcgtaggcggttttttaagtctgatgtgaaagcccacggctcaaccgtggagggtcattggaaactggaaaacttgagtgcagaagaggaaagtggaattccatgtgtagcggtgaaatgcgcagagatatggaggaacaccagtggcgaaggcgactttctggtctgtaactgacgctgatgtgcgaaagcgtggggatcaaacaggattagataccctggtagtccacgccgtaaacgatgagtgctaagtgttagggggtttccgccccttagtgctgcagctaacgcattaagcactccgcctggggagtacgaccgcaaggttgaaactcaaaggaattgacggggacccgcacaagcggtggagcatgtggtttaattcgaagcaacgcgaagaaccttaccaaatcttgacatcctttgacaactctagagatagagccttccccttcgggggacaaagtgacaggtggtgcatggttgtcgtcagctcgtgtcgtgagatgttgggttaagtcccgcaacgagcgcaacccttaagcttagttgccatcattaagttgggcactctaagttgactgccggtgacaaaccggaggaaggtggggatgacgtcaaatcatcatgccccttatgatttgggctacacacgtgctacaatggacaatacaaagggcagcgaaaccgcgaggtcaagcaaatcccataaagttgttctcagttcggattgtagtctgcaactcgactacatgaagctggaatcgctagtaatcgtagatcagcatgctacggtgaatacgttcccgggtcttgtacacaccgcccgtcacaccacgagagtttgtaacacccgaagccggtggagtaaccttttaggagctagccgtcgaaggtgggacaaatgattggggtgaagtcgtaacaaggtagccgtatcggaaggtgcggctggatcatgtggtttccttaaagaagcgtactttgtagtgctcacacagattgtctgatagaaagtgaaaagcaaggcgtttacgcgttgggagtgaggctgaagagaataaggccgttcgctttctattaatgaaagctcaccctacacgaaaatatcacgcaacgcgtgataagcaattttcgtgtccccttcgtctagaggcccaggacaccgccctttcacggcggtaacaggggttcgaatcccctaggggacgccacttgctggtttgtgagtgaaagtcgccgaccttaatatctcaaaactcatcttcgggtgatgtttgagatatttgctctttaaaaatctggatcaagctgaaaattgaaacactgaacaacgagagttgttcgtgagtctctcaaattttcgcaacacgatgatgaatcgaaagaaacatcttcgggttgtgagattaagttattaagggcgcacggtggatgccttggcactagaagccgatgaaggacgttactaacgacgatatgctttggggagctgtaagtaagctttgatccagagatttccgaatggggaaacccagcatgagttatgtcatgttatcgatatgtgaatacatagcatatcagaaggcacacccggagaactgaaacatcttagtacccggaggaagagaaagaaaattcgattcccttagtagcggcgagcgaaacgggaagagcccaaaccaacaagcttgcttgttggggttgtaggacactctatacggagttacaaaggacgacattagacgaatcatctggaaagatgaatcaaagaaggtaataatcctgtagtcgaaaatgttgtctctcttgagtggatcctgagtacgacggagcacgtgaaattccgtcggaatctgggaggaccatctcctaaggctaaatactctctagtgaccgatagtgaaccagtaccgtgagggaaaggtgaaaagcaccccggaaggggagtgaaatagaacctgaaaccgtgtgcttacaagtagtcagagcccgttaatgggtgatggcgtgccttttgtagaatgaaccggcgagttacgatttgatgcaaggttaagcagtaaatgtggagccgtagcgaaagcgagtctgaatagggcgtttagtatttggtcgtagacccgaaaccaggtgatctacccttggtcaggttgaagttcaggtaacactgaatggaggaccgaaccgacttacgttgaaaagtgagcggatgaactgagggtagcggagaaattccaatcgaacctggagatagctggttctctccgaaatagctttagggctagcctcaagtgatgattattggaggtagagcactgtttggacgaggggcccctctcgggttaccgaattcagacaaactccgaatgccaattaatttaacttgggagtcagaacatgggtgataaggtccgtgttcgaaagggaaacagcccagaccaccagctaaggtcccaaaatatatgttaagtggaaaaggatgtggcgttgcccagacaactaggatgttggcttagaagcagccatcatttaaagagtgcgtaatagctcactagtcgagtgacactgcgccgaaaatgtaccggggctaaacatattaccgaagctgtggattgtcctttggacaatggtaggagagcgttctaagggcgttgaagcatgatcgtaaggacatgtggagcgcttagaagtgagaatgccggtgtgagtagcgaaagacgggtgagaatcccgtccaccgattgactaaggtttccagaggaaggctcgtccgctctgggttagtcgggtcctaagctgaggccgacaggcgtaggcgatggataacaggttgatattcctgtaccacctataatcgttttaatcgatggggggacgcagtaggataggcgaagcgtgcgattggattgcacgtctaagcagtaaggctgagtattaggcaaatccggtactcattaaggctgagctgtgatggggagaagacattgtgtcttcgagtcgttgatttcacactgccgagaaaagcctctagatagaaaataggtgcccgtaccgcaaaccgacacaggtagtcaagatgagaattctaaggtgagcgagcgaactctcgttaaggaactcggcaaaatgaccccgtaacttcgggagaaggggtgctctttagggttaacgcccagaagagccgcagtgaataggcccaagcgactgtttatcaaaaacacaggtctctgctaaaccgtaaggtgatgtataggggctgacgcctgcccggtgctggaaggttaagaggagtggttagcttctgcgaagctacgaatcgaagccccagtaaacggcggccgtaactataacggtcctaaggtagcgaaattccttgtcgggtaagttccgacccgcacgaaaggcgtaacgatttgggcactgtctcaacgagagactcggtgaaatcatagtacctgtgaagatgcaggttacccgcgacaggacggaaagaccccgtggagctttactgtagcctgatattgaaattcggcacagcttgtacaggataggtaggagcctttgaaacgtgagcgctagcttacgtggaggcgctggtgggatactaccctagctgtgttggctttctaacccgcaccacttatcgtggtgggagacagtgtcaggcgggcagtttgactggggcggtcgcctcctaaaaggtaacggaggcgctcaaaggttccctcagaatggttggaaatcattcatagagtgtaaaggcataagggagcttgactgcgagacctacaagtcgagcagggtcgaaagacggacttagtgatccggtggttccgcatggaagggccatcgctcaacggataaaagctaccccggggataacaggcttatctcccccaagagttcacatcgacggggaggtttggcacctcgatgtcggctcatcgcatcctggggctgtagtcggtcccaagggttgggctgttcgcccattaaagcggtacgcgagctgggttcagaacgtcgtgagacagttcggtccctatccgtcgtgggcgtaggaaatttgagaggagctgtccttagtacgagaggaccgggatggacatacctctggtgtaccagttgtcgtgccaacggcatagctgggtagctatgtgtggacgggataagtgctgaaagcatctaagcatgaagcccccctcaagatgagatttcccaacttcggttataagatccctcaaagatgatgaggttaataggttcgaggtggaagcatggtgacatgtggagctgacgaatactaatcgatcgaagacttaatcaaacaacgccgaagctgttttggcggatgagagaagattttcagcctgatacagattaaatcagaacgcagaagcggtctgataaaacagaatttgtctggtgactatagcaaggaggtcacacctgttcccatgccgaacacagaagttaagctccttagcgtcgatggtagtcgaacttacgttccgctagagtagaacgttgccaggcaacaaataaaacgaaaggctcagtcgaaagactgggcctttcgttttatctgttgtttgtcggtgaacgctctcctgagtaggacaaatccgccgggagcggatttgaacgttgcgaagcaacggcccggagggtggcgggcaggacgcccgccataaactgccaggcatcaaattaagcagaaggccatcctgacggatggcctttttgcgtttctacaaactcttcctgtcgtcatatctacaagccggcgcgccgggaaatgtgcgcggaacccctatttgtttatttttctaaatacattcaaatatgtatccgctcatgagacaataaccctgataaatgcttcaataatattgaaaaaggaagagtatgagtattcaacatttccgtgtcgcccttattcccttttttgcggcattttgccttcctgtttttgctcacccagaaacgctggtgaaagtaaaagatgctgaagatcagttgggtgcacgagtgggttacatcgaactggatctcaacagcggtaagatccttgagagttttcgccccgaagaacgttttccaatgatgagcacttttaaagttctgctatgtggcgcggtattatcccgtgttgacgccgggcaagagcaactcggtcgccgcatacactattctcagaatgacttggttgagtactcaccagtcacagaaaagcatcttacggatggcatgacagtaagagaattatgcagtgctgcaataaccatgagtgataacactgcggccaacttacttctgacaacgatcggaggaccgaaggagctaaccgcttttttgcacaacatgggggatcatgtaactcgccttgatcgttgggaaccggagctgaatgaagccataccaaacgacgagcgtgacaccacgatgcctgcagcaatggcaacaacgttgcgcaaactattaactggcgaactacttactctagcttcccggcaacaattaatagactggatggaggcggataaagttgcaggaccacttctgcgctcggcccttccggctagctggtttattgctgataaatctggagccggtgagcgtgggtctcgcggtatcattgcagcactggggccagatggtaagccctcccgtatcgtagttatctacacgacggggagtcaggcaactatggatgaacgaaatagacagatcgctgagataggtgcctcactgattaagcattggtaactgcagaccaagtttactcatatatactttagattgatttaaaacttcatttttaatttaaaaggatctaggtgaagatcctttttgataatctcatgaccaaaatcccttaacgtgagttttcgttccactgagcgtcagaccccgtagaaaagatcaaaggatcttcttgagatcctttttttctgcgcgtaatctgctgcttgcaaacaaaaaaaccaccgctaccagcggtggtttgtttgccggatcaagagctaccaactctttttccgaaggtaactggcttcagcagagcgcagataccaaatactgtccttctagtgtagccgtagttaggccaccacttcaagaactctgtagcaccgcctacatacctcgctctgctaatcctgttaccagtggctgctgccagtggcgataagtcgtgtcttaccgggttggactcaagacgatagttaccggataaggcgcagcggtcgggctgaacggggggttcgtgcacacagcccagcttggagcgaacgacctacaccgaactgagatacctacagcgtgagctatgagaaagcgccacgcttcccgaagggagaaaggcggacaggtatccggtaagcggcagggtcggaacaggagagcgcacgagggagcttccagggggaaacgcctggtatctttatagtcctgtcgggtttcgccacctctgacttgagcgtcgatttttgtgatgctcgtcaggggggcggagcctatggaaaaacgccagcaacgcggcctttttacggttcctggccttttgctgg

SEQ ID NO: 106 - DNA, 7397 bp, Artificial
  Synthetic
agacttagggaccctgcggccgccattaattcctaatttttgttgacactctatcattgatagagttattttaccactccctatcagtgatagagaaaagtgaaatgaatagaccggccgctgagaaaaagcgaagcggcttgacagtagcggcggtaaatgttatgataataaagtcgcttaaacgagcggtaaacaaagttctttgaaaactaaacaagacaaaacgtacctgttaattcatttttataaatcgcacagcaatgtgcgtagtcagtcaaactactttatcggagagtttgatcctggctcaggacgaacgctggcggcgtgcctaatacatgcaagtcgagcggacagatgggagcttgctccctgatgttagcggcggacgggtgagtaacacgtgggtaacctgcctgtaagactgggataactccgggaaaccggggctaataccggatggttgtttgaaccgcatggttcaaacataaaaggtggcttcggctaccacttacagatggacccgcggcgcattagctagttggtgaggtaacggctcaccaaggcgacgatgcgtagccgacctgagagggtgatcggccacactgggactgagacacggcccagactcctacgggaggcagcagtagggaatcttccgcaatggacgaaagtctgacggagcaacgccgcgtgagtgatgaaggttttcggatcgtaaagctctgttgttagggaagaacaagtaccgttcgaatagggcggtaccttgacggtacctaaccagaaagccacggctaactacgtgccagcagccgcggtaatacgtaggtggcaagcgttgtccggaattattgggcgtaaagggctcgcaggcggtttcttaagtctgatgtgaaagcccccggctcaaccggggagggtcattggaaactggggaacttgagtgcagaagaggagagtggaattccacgtgtagcggtgaaatgcgtagagatgtggaggaacaccagtggcgaaggcgactctctggtctgtaactgacgctgaggagcgaaagcgtggggagcgaacaggattagataccctggtagtccacgccgtaaacgatgagtgctaagtgttagggggtttccgccccttagtgctgcagctaacgcattaagcactccgcctggggagtacggtcgcaagactgaaactcaaaggaattgacgggggcccgcacaagcggtggagcatgtggtttaattcgaagcaacgcgaagaaccttaccaggtcttgacatcctctgacaatcctagagataggacgtccccttcgggggcagagtgacaggtggtgcatggttgtcgtcagctcgtgtcgtgagatgttgggttaagtcccgcaacgagcgcaacccttgatcttagttgccagcattcagttgggcactctaaggtgactgccggtgacaaaccggaggaaggtggggatgacgtcaaatcatcatgccccttatgacctgggctacacacgtgctacaatggacagaacaaagggcagcgaaaccgcgaggttaagccaatcccacaaatctgttctcagttcggatcgcagtctgcaactcgactgcgtgaagctggaatcgctagtaatcgcggatcagcatgccgcggtgaatacgttcccgggccttgtacacaccgcccgtcacaccacgagagtttgtaacacccgaagtcggtgaggtaaccttttaggagccagccgccgaaggtgggacagatgattggggtgaagtcgtaacaaggtagccgtatcggaaggtgcggctggatcatgtggtttctaaggatattttacggaatataagaccttgggtcttataaacagaacgttccctgtcttgtttagttttgaaggaactttgttccttgaataagttaagatgggcctgtagctcagctggttagagcgcacgcctgataagcgtgaggtcggtggttcgagtccactcaggcccaccatcttatataacggggccttagctcagctgggagagcgcctgctttgcacgcaggaggtcagcggttcgatcccgctaggctccaccaacgtgttctttgaaaactagataacagtagacatcacattcaattagtaacacaagatatcacatagtgattctttttaacggttaagttagaaagggcgcacggtggatgccttggcactaggagccgatgaaggacgggacgaacaccgatatgcttcggggagctgtaagcaagctttgatccggagatttccgaatggggaaacccaccactcgtaatggagtggtatccatatctgaattcataggatatgagaaggcagacccggggaactgaaacatctaagtacccggaggaagagaaagcaaatgcgattccctgagtagcggcgagcgaaacgggattagcccaaaccaagaggcttgcctcttggggttgtaggacactctgtacggagttacaaaggaacgaggtagatgaagaggtctggaaaggcccgccataggaggtaacagccctgtagtcaaaacttcgttctctcctgagtggatcctgagtacggcggaacacgtgaaattccgtcggaatccgggaggaccatctcccaaggctaaatactccctagtgaccgatagtgaaccagtaccgtgagggaaaggtgaaaagcaccccggaaggggagtgaaagagatcctgaaaccgtgtgcctacaagtagtcagagcccgttaacgggtgatggcgtgccttttgtagaatgaaccggcgagttacgatcccgtgcaaggttaagcagaagatgcggagccgcagcgaaagcgagtctgaatagggcgcatgagtacgtggtcgtagacccgaaaccaggtgatctacccatgtccagggtgaagttcaggtaacactgaatggaggcccgaacccacgcacgttgaaaagtgcggggatgaggtgtgggtaggggtgaaatgccaatcgaacctggagatagctggttctctccgaaatagctttagggctagcctcaaggtaagagtcttggaggtagagcactgattggactaggggcccctaccgggttaccgaattcagtcaaactccgaatgccaatgacttatccttgggagtcagactgcgagtgataagatccgtagtcgaaagggaaacagcccagaccgccagctaaggtcccaaagtatacgttaagtggaaaaggatgtggagttgcttagacaaccaggatgttggcttagaagcagccaccatttaaagagtgcgtaatagctcactggtcgagtgactctgcgccgaaaatgtaccggggctaaacgtatcaccgaagctgcggactgttcttcgaacagtggtaggagagcgttctaagggctgtgaagccagaccggaaggactggtggagcgcttagaagtgagaatgccggtatgagtagcgaaagaggggtgagaatcccctccaccgaatgcctaaggtttcctgaggaaggctcgtccgctcagggttagtcgggacctaagccgaggccgaaaggcgtaggcgatggacaacaggttgatattcctgtaccacctcctcaccatttgagcaatggggggacgcaggaggatagggtaagcgcggtattggatatccgcgtccaagcagttaggctgggaaataggcaaatccgtttcccataaggctgagctgtgatggcgagcgaaatatagtagcgaagttcctgattccacactgccaagaaaagcctctagcgaggtgagaggtgcccgtaccgcaaaccgacacaggtaggcgaggagagaatcctaaggtgatcgagagaactctcgttaaggaactcggcaaaatgaccccgtaacttcgggagaaggggtgctctgttagggtgcaagcccgagagagccgcagtgaataggcccaggcgactgtttagcaaaaacacaggtctctgcgaagccgtaaggcgaagtataggggctgacgcctgcccggtgctggaaggttaagaggagcgcttagcgtaagcgaaggtgcgaattgaagccccagtaaacggcggccgtaactataacggtcctaaggtagcgaaattccttgtcgggtaagttccgacccgcacgaaaggcgcaacgatctgggcactgtctcaacgagagactcggtgaaattatagtacctgtgaagatgcaggttacccgcgacaggacggaaagaccccgtggagctttactgcagcctgatattgaatgttggtacagcttgtacaggataggtaggagccttggaaaccggagcgccagcttcggtggaggcatcggtgggatactaccctggctgtattgaccttctaacccgccgcccttatcgggcggggagacagtgtcaggtgggcagtttgactggggcggtcgcctcctaaaaggtaacggaggcgcccaaaggttccctcagaatggttggaaatcattcgcagagtgtaaaggcacaagggagcttgactgcgagacctacaagtcgagcagggacgaaagtcgggcttagtgatccggtggttccgcatggaagggccatcgctcaacggataaaagctaccccggggataacaggcttatctcccccaagagtccacatcgacggggaggtttggcacctcgatgtcggctcatcgcatcctggggctgtagtcagtcccaagggttgggctgttcgcccattaaagcggtacgcgagctgggttcagaacgtcgtgagacagttcggtccctatccgtcgcgggcgcaggaaatttgagaggagctgtccttagtacgagaggaccgggatggacgcaccgctggtgtaccagttgttctgccaagggcatcgctgggtagctatgtgcggacgggataagtgctgaaagcatctaagcatgaagcccccctcaagatgagatttcccattccgcaaggaagtaagatccctgaaagatgatcaggttgataggtctgaggtggaagtgtggcgacacatggagctgacagatactaatcgatcgaggacttaaccacattttgaatgatgtcacacctgttatctagttttgagagaacacctctctaaaggcggaaggtaaggaaactccgctaagggctctcacatcctgtgagaaacgcccagtaccttcatcctgaaggcatttgtttggtggcgatagcgaagaggtcacacccgttcccataccgaacacggaagttaagctcttcagcgccgatggtagtcgggggtttccccctgtgagagtaggacgccgccaagcaagcttaaacccagcttaatgagctgggttttttgtttactcaagatcgagaaaatcaaacaaatacaaacaccgagggcttatatagcccatatactgatttaaagtttcaaaaaggtctaaatagtgtatacaatatccgttttaaggggaggctaactgtacggaggtggagaagatggacgaaacagttaaacttaatcatacatgtgtgatttgtgatcaagagaagaatagaggcattcatctttgcgcgccgggaaatgtgcgcggaacccctatttgtttatttttctaaatacattcaaatatgtatccgctcatgagacaataaccctgataaatgcttcaataatattgaaaaaggaagagtatgagtattcaacatttccgtgtcgcccttattcccttttttgcggcattttgccttcctgtttttgctcacccagaaacgctggtgaaagtaaaagatgctgaagatcagttgggtgcacgagtgggttacatcgaactggatctcaacagcggtaagatccttgagagttttcgccccgaagaacgttttccaatgatgagcacttttaaagttctgctatgtggcgcggtattatcccgtgttgacgccgggcaagagcaactcggtcgccgcatacactattctcagaatgacttggttgagtactcaccagtcacagaaaagcatcttacggatggcatgacagtaagagaattatgcagtgctgcaataaccatgagtgataacactgcggccaacttacttctgacaacgatcggaggaccgaaggagctaaccgcttttttgcacaacatgggggatcatgtaactcgccttgatcgttgggaaccggagctgaatgaagccataccaaacgacgagcgtgacaccacgatgcctgcagcaatggcaacaacgttgcgcaaactattaactggcgaactacttactctagcttcccggcaacaattaatagactggatggaggcggataaagttgcaggaccacttctgcgctcggcccttccggctagctggtttattgctgataaatctggagccggtgagcgtgggtctcgcggtatcattgcagcactggggccagatggtaagccctcccgtatcgtagttatctacacgacggggagtcaggcaactatggatgaacgaaatagacagatcgctgagataggtgcctcactgattaagcattggtaactgcagaccaagtttactcatatatactttagattgatttaaaacttcatttttaatttaaaaggatctaggtgaagatcctttttgataatctcatgaccaaaatcccttaacgtgagttttcgttccactgagcgtcagaccccgtagaaaagatcaaaggatcttcttgagatcctttttttctgcgcgtaatctgctgcttgcaaacaaaaaaaccaccgctaccagcggtggtttgtttgccggatcaagagctaccaactctttttccgaaggtaactggcttcagcagagcgcagataccaaatactgtccttctagtgtagccgtagttaggccaccacttcaagaactctgtagcaccgcctacatacctcgctctgctaatcctgttaccagtggctgctgccagtggcgataagtcgtgtcttaccgggttggactcaagacgatagttaccggataaggcgcagcggtcgggctgaacggggggttcgtgcacacagcccagcttggagcgaacgacctacaccgaactgagatacctacagcgtgagctatgagaaagcgccacgcttcccgaagggagaaaggcggacaggtatccggtaagcggcagggtcggaacaggagagcgcacgagggagcttccagggggaaacgcctggtatctttatagtcctgtcgggtttcgccacctctgacttgagcgtcgatttttgtgatgctcgtcaggggggcggagcctatggaaaaacgccagcaacgcggcctttttacggttcctggccttttgctgg

SEQ ID NO: 107 - DNA, 7450 bp, Artificial
  Synthetic
agacttagggaccctgcggccgccattaattcctaatttttgttgacactctatcattgatagagttattttaccactccctatcagtgatagagaaaagtgaaatgaatagaccggccgctgagaaaaagcgaagcggcactgctctttaacaatttatcagacaatctgtgtgggcactcgaagatacggattcttaacgtcgcaagacgaaaaatgaataccaagtctcaagagtgaacacgtaattcattacgaagtttaattctttgagcgtcaaacttttttatcggagagtttgatcctggctcaggacgaacgctggcggcgtgcctaatacatgcaagtcgagcggacagatgggagcttgctccctgatgttagcggcggacgggtgagtaacacgtgggtaacctgcctgtaagactgggataactccgggaaaccggggctaataccggatggttgtttgaaccgcatggttcaaacataaaaggtggcttcggctaccacttacagatggacccgcggcgcattagctagttggtgaggtaacggctcaccaaggcgacgatgcgtagccgacctgagagggtgatcggccacactgggactgagacacggcccagactcctacgggaggcagcagtagggaatcttccgcaatggacgaaagtctgacggagcaacgccgcgtgagtgatgaaggttttcggatcgtaaagctctgttgttagggaagaacaagtaccgttcgaatagggcggtaccttgacggtacctaaccagaaagccacggctaactacgtgccagcagccgcggtaatacgtaggtggcaagcgttgtccggaattattgggcgtaaagggctcgcaggcggtttcttaagtctgatgtgaaagcccccggctcaaccggggagggtcattggaaactggggaacttgagtgcagaagaggagagtggaattccacgtgtagcggtgaaatgcgtagagatgtggaggaacaccagtggcgaaggcgactctctggtctgtaactgacgctgaggagcgaaagcgtggggagcgaacaggattagataccctggtagtccacgccgtaaacgatgagtgctaagtgttagggggtttccgccccttagtgctgcagctaacgcattaagcactccgcctggggagtacggtcgcaagactgaaactcaaaggaattgacgggggcccgcacaagcggtggagcatgtggtttaattcgaagcaacgcgaagaaccttaccaggtcttgacatcctctgacaatcctagagataggacgtccccttcgggggcagagtgacaggtggtgcatggttgtcgtcagctcgtgtcgtgagatgttgggttaagtcccgcaacgagcgcaacccttgatcttagttgccagcattcagttgggcactctaaggtgactgccggtgacaaaccggaggaaggtggggatgacgtcaaatcatcatgccccttatgacctgggctacacacgtgctacaatggacagaacaaagggcagcgaaaccgcgaggttaagccaatcccacaaatctgttctcagttcggatcgcagtctgcaactcgactgcgtgaagctggaatcgctagtaatcgcggatcagcatgccgcggtgaatacgttcccgggccttgtacacaccgcccgtcacaccacgagagtttgtaacacccgaagtcggtgaggtaaccttttaggagccagccgccgaaggtgggacagatgattggggtgaagtcgtaacaaggtagccgtatcggaaggtgcggctggatcatgtggtttccttaaagaagcgtactttgtagtgctcacacagattgtctgatagaaagtgaaaagcaaggcgtttacgcgttgggagtgaggctgaagagaataaggccgttcgctttctattaatgaaagctcaccctacacgaaaatatcacgcaacgcgtgataagcaattttcgtgtccccttcgtctagaggcccaggacaccgccctttcacggcggtaacaggggttcgaatcccctaggggacgccacttgctggtttgtgagtgaaagtcgccgaccttaatatctcaaaactcatcttcgggtgatgtttgagatatttgctctttaaaaatctggatcaagctgaaaattgaaacactgaacaacgagagttgttcgtgagtctctcaaattttcgcaacacgatgatgaatcgaaagaaacatcttcgggttgtgaggttaagttagaaagggcgcacggtggatgccttggcactaggagccgatgaaggacgggacgaacaccgatatgcttcggggagctgtaagcaagctttgatccggagatttccgaatggggaaacccaccactcgtaatggagtggtatccatatctgaattcataggatatgagaaggcagacccggggaactgaaacatctaagtacccggaggaagagaaagcaaatgcgattccctgagtagcggcgagcgaaacgggattagcccaaaccaagaggcttgcctcttggggttgtaggacactctgtacggagttacaaaggaacgaggtagatgaagaggtctggaaaggcccgccataggaggtaacagccctgtagtcaaaacttcgttctctcctgagtggatcctgagtacggcggaacacgtgaaattccgtcggaatccgggaggaccatctcccaaggctaaatactccctagtgaccgatagtgaaccagtaccgtgagggaaaggtgaaaagcaccccggaaggggagtgaaagagatcctgaaaccgtgtgcctacaagtagtcagagcccgttaacgggtgatggcgtgccttttgtagaatgaaccggcgagttacgatcccgtgcaaggttaagcagaagatgcggagccgcagcgaaagcgagtctgaatagggcgcatgagtacgtggtcgtagacccgaaaccaggtgatctacccatgtccagggtgaagttcaggtaacactgaatggaggcccgaacccacgcacgttgaaaagtgcggggatgaggtgtgggtaggggtgaaatgccaatcgaacctggagatagctggttctctccgaaatagctttagggctagcctcaaggtaagagtcttggaggtagagcactgattggactaggggcccctaccgggttaccgaattcagtcaaactccgaatgccaatgacttatccttgggagtcagactgcgagtgataagatccgtagtcgaaagggaaacagcccagaccgccagctaaggtcccaaagtatacgttaagtggaaaaggatgtggagttgcttagacaaccaggatgttggcttagaagcagccaccatttaaagagtgcgtaatagctcactggtcgagtgactctgcgccgaaaatgtaccggggctaaacgtatcaccgaagctgcggactgttcttcgaacagtggtaggagagcgttctaagggctgtgaagccagaccggaaggactggtggagcgcttagaagtgagaatgccggtatgagtagcgaaagaggggtgagaatcccctccaccgaatgcctaaggtttcctgaggaaggctcgtccgctcagggttagtcgggacctaagccgaggccgaaaggcgtaggcgatggacaacaggttgatattcctgtaccacctcctcaccatttgagcaatggggggacgcaggaggatagggtaagcgcggtattggatatccgcgtccaagcagttaggctgggaaataggcaaatccgtttcccataaggctgagctgtgatggcgagcgaaatatagtagcgaagttcctgattccacactgccaagaaaagcctctagcgaggtgagaggtgcccgtaccgcaaaccgacacaggtaggcgaggagagaatcctaaggtgatcgagagaactctcgttaaggaactcggcaaaatgaccccgtaacttcgggagaaggggtgctctgttagggtgcaagcccgagagagccgcagtgaataggcccaggcgactgtttagcaaaaacacaggtctctgcgaagccgtaaggcgaagtataggggctgacgcctgcccggtgctggaaggttaagaggagcgcttagcgtaagcgaaggtgcgaattgaagccccagtaaacggcggccgtaactataacggtcctaaggtagcgaaattccttgtcgggtaagttccgacccgcacgaaaggcgcaacgatctgggcactgtctcaacgagagactcggtgaaattatagtacctgtgaagatgcaggttacccgcgacaggacggaaagaccccgtggagctttactgcagcctgatattgaatgttggtacagcttgtacaggataggtaggagccttggaaaccggagcgccagcttcggtggaggcatcggtgggatactaccctggctgtattgaccttctaacccgccgcccttatcgggcggggagacagtgtcaggtgggcagtttgactggggcggtcgcctcctaaaaggtaacggaggcgcccaaaggttccctcagaatggttggaaatcattcgcagagtgtaaaggcacaagggagcttgactgcgagacctacaagtcgagcagggacgaaagtcgggcttagtgatccggtggttccgcatggaagggccatcgctcaacggataaaagctaccccggggataacaggcttatctcccccaagagtccacatcgacggggaggtttggcacctcgatgtcggctcatcgcatcctggggctgtagtcggtcccaagggttgggctgttcgcccattaaagcggtacgcgagctgggttcagaacgtcgtgagacagttcggtccctatccgtcgcgggcgcaggaaatttgagaggagctgtccttagtacgagaggaccgggatggacgcaccgctggtgtaccagttgttctgccaagggcatcgctgggtagctatgtgcggacgggataagtgctgaaagcatctaagcatgaagcccccctcaagatgagatttcccattccgcaaggaagtaagatccctgaaagatgatcaggttgataggtctgaggtggaagtgtggcgacacatggagctgacagatactaatcgatcgaggacttaaccacacaacgccgaagctgttttggcggatgagagaagattttcagcctgatacagattaaatcagaacgcagaagcggtctgataaaacagaatttgtttggtggcgatagcgaagaggtcacacccgttcccataccgaacacggaagttaagctcttcagcgccgatggtagtcgggggtttccccctgtgagagtaggacgccgccaagcaacaaataaaacgaaaggctcagtcgaaagactgggcctttcgttttatctgttgtttgtcggtgaacgctctcctgagtaggacaaatccgccgggagcggatttgaacgttgcgaagcaacggcccggagggtggcgggcaggacgcccgccataaactgccaggcatcaaattaagcagaaggccatcctgacggatggcctttttgcgtttctacaaactcttcctgtcgtcatatctacaagccggcgcgccgggaaatgtgcgcggaacccctatttgtttatttttctaaatacattcaaatatgtatccgctcatgagacaataaccctgataaatgcttcaataatattgaaaaaggaagagtatgagtattcaacatttccgtgtcgcccttattcccttttttgcggcattttgccttcctgtttttgctcacccagaaacgctggtgaaagtaaaagatgctgaagatcagttgggtgcacgagtgggttacatcgaactggatctcaacagcggtaagatccttgagagttttcgccccgaagaacgttttccaatgatgagcacttttaaagttctgctatgtggcgcggtattatcccgtgttgacgccgggcaagagcaactcggtcgccgcatacactattctcagaatgacttggttgagtactcaccagtcacagaaaagcatcttacggatggcatgacagtaagagaattatgcagtgctgcaataaccatgagtgataacactgcggccaacttacttctgacaacgatcggaggaccgaaggagctaaccgcttttttgcacaacatgggggatcatgtaactcgccttgatcgttgggaaccggagctgaatgaagccataccaaacgacgagcgtgacaccacgatgcctgcagcaatggcaacaacgttgcgcaaactattaactggcgaactacttactctagcttcccggcaacaattaatagactggatggaggcggataaagttgcaggaccacttctgcgctcggcccttccggctagctggtttattgctgataaatctggagccggtgagcgtgggtctcgcggtatcattgcagcactggggccagatggtaagccctcccgtatcgtagttatctacacgacggggagtcaggcaactatggatgaacgaaatagacagatcgctgagataggtgcctcactgattaagcattggtaactgcagaccaagtttactcatatatactttagattgatttaaaacttcatttttaatttaaaaggatctaggtgaagatcctttttgataatctcatgaccaaaatcccttaacgtgagttttcgttccactgagcgtcagaccccgtagaaaagatcaaaggatcttcttgagatcctttttttctgcgcgtaatctgctgcttgcaaacaaaaaaaccaccgctaccagcggtggtttgtttgccggatcaagagctaccaactctttttccgaaggtaactggcttcagcagagcgcagataccaaatactgtccttctagtgtagccgtagttaggccaccacttcaagaactctgtagcaccgcctacatacctcgctctgctaatcctgttaccagtggctgctgccagtggcgataagtcgtgtcttaccgggttggactcaagacgatagttaccggataaggcgcagcggtcgggctgaacggggggttcgtgcacacagcccagcttggagcgaacgacctacaccgaactgagatacctacagcgtgagctatgagaaagcgccacgcttcccgaagggagaaaggcggacaggtatccggtaagcggcagggtcggaacaggagagcgcacgagggagcttccagggggaaacgcctggtatctttatagtcctgtcgggtttcgccacctctgacttgagcgtcgatttttgtgatgctcgtcaggggggcggagcctatggaaaaacgccagcaacgcggcctttttacggttcctggccttttgctgg

SEQ ID NO: 108 - DNA, 7201 bp, Artificial
  Synthetic
agacttagggaccctgcggccgccattaattcctaatttttgttgacactctatcattgatagagttattttaccactccctatcagtgatagagaaaagtgaaatgaatagaccggccgctgagaaaaagcgaagcggcttatttttaaggtgatatagtattacttgtccttaagaaaagggcaaacataaaaaatgaactttgaaaattaaacagtaggttaatttataaaacaagaaacaaaccataaagccagatattttgataacaatagtatctgagcctgataaacttttatttgagagtttgatcctggctcaggatgaacgctggcggcgtgcctaacacatgcaagttgagcgatttacttcggtaaagagcggcggacgggtgagtaacgcgtgggtaacctaccctgtacacacggataacataccgaaaggtatgctaatacgggataatatatttgagaggcatctcttaaatatcaaaggtgagccagtacaggatggacccgcgtctgattagctagttggtaaggtaacggcttaccaaggcgacgatcagtagccgacctgagagggtgatcggccacattggaactgagacacggtccaaactcctacgggaggcagcagtggggaatattgcacaatgggcgaaagcctgatgcagcaacgccgcgtgagtgatgaaggccttcgggtcgtaaaactctgtcctcaaggaagataatgacggtacttgaggaggaagccccggctaactacgtgccagcagccgcggtaatacgtagggggctagcgttatccggatttactgggcgtaaagggtgcgtaggcggtctttcaagtcaggagtgaaaggctacggctcaaccgtagtaagctcttgaaactgggagacttgagtgcaggagaggagagtggaattcctagtgtagcggtgaaatgcgtagatattaggaggaacaccagttgcgaaggcggctctctggactgtaactgacgctgaggcacgaaagcgtggggagcaaacaggattagataccctggtagtccacgctgtaaacgatgagtactaggtgtcgggggttacccccttcggtgccgcagctaacgcattaagtactccgcctgggaagtacgctcgcaagagtgaaactcaaaggaattgacggggacccgcacaagtagcggagcatgtggtttaattcgaagcaacgcgaagaaccttacctaagcttgacatcccaatgacatctccttaatcggagagttcccttcggggacattggtgacaggtggtgcatggttgtcgtcagctcgtgtcgtgagatgttgggttaagtcccgcaacgagcgcaacccttgtctttagttgccatcattaagttgggcactctagagagactgccagggataacctggaggaaggtggggatgacgtcaaatcatcatgccccttatgcttagggctacacacgtgctacaatgggtagtacagagggttgccaagccgtaaggtggagctaatcccttaaagctactctcagttcggattgtaggctgaaactcgcctacatgaagctggagttactagtaatcgcagatcagaatgctgcggtgaatgcgttcccgggtcttgtacacaccgcccgtcacaccacgggagttggagacgcccgaagccgattatctaaccttttggaagaagtcgtcgaaggtggaatcaataactggggtgaagtcgtaacaaggtagccgtatcggaaggtgcggctggatcatgtggtttctaaggagaattacctactgtttaattttgagggttcgtttttacgaatactcaaaattagcactttaagcaacgggatttatccgttggcgctgtgcgttagcactttgaaaactgcatatatatatttagtgatatgacatctaatttgtaatatataaagctgataactttttaaaattatcgaagttgatagcttctaatctatcaaacctttttaactggtcaagttattaagggtgcagggcggatgccttggcactaggagccgatgaaggacgtgataagctgcgataagcttcggggagttgcacgtaaactttgatccgaagatttccgaatgaggaaactcacttagagtaatgtctaagtatcattaagtgaatacatagcttaatgaggggaactcagggaactgaaacatctaagtacctgaaggaagagaaagaaattcgattccgtaagtagcggcgagcgaacgcggattagcccaaaccaataaagttttctttattggggttgcggacatatcataacgaagaggtatcgtaattgaagaggtttggaaagacccaccacagaaggtaatagtcctgtatgttaaacgagaagactttagatatgatccagagtaccacgggacacgtgaaaccctgtgggaagcaggagggaccaccctccaaggctaaatactacctagtgaccgatagcgtatagtaccgtgagggaaaggtgaaaagaaccccgggaggggagtgaaatagaacctgaaaccctgcacttacaagctgtggaagcacatttcttgtgtgaccgcgtactttttgtagaacgggccaacgagttacgttaagtagcaaggttaagcacttaaggtgcggagccgtagcgaaagcgagttttaactgagcgttcagttacttgacgtagacccgaaaccgggcgacctacccatgagcaggatgaagcgaaagtaaaatttcgtggaggtccgaacccacgagcgttgaaaagctcggggatgacttgtgggtagcggtgaaattccaatcgagcccggagatagctggttctccccgaaatagctttagggctagcctcaaggtgagagatacggaggtagagcactgaatgtcctagggggtattgcacctaccgaagactatcaaactccgaatgccgtcatcttatacttgggagtcagactgtgggtgataagattcatagtcgaaagggcaacagcccagatcgtcagctaaggtccctaaatgtaagttaagtggtaaaggatgtgggattgcacagacaaccaggatgttggcttagaagcagccactcattcaaagagtgcgtaatagctcactggtcgagtgatcctgcgccgaagatttccggggctaaaacttactaccgaagctacggcatcagtaatgatgggtaggggagcttcccatacgggttgaagcatgaccgtaaggacatgtggacagtatgggagtgagaatgttggcatgagtagcgagatgtgggtgagaatcccacaggccgtaaacccaaggtttccaggggaaggttcgtctgccctgggttagtcgggacctaagctgaggccgaaaggcgtaggtgatggacaacaggttgatattcctgtactaccgataaccgtttgagagatgggatgacacagtaggataagctaagcacactgttggttatgtgtgcccaagcattgaggcagtcaaagtaggcaaatccgctttgataatgctgggatgtgatggggagcgaaatttagtagcgaagtagctgatttcacactgtcaagaaaagtctctatcgaggttaaaggtacccgtaccgcaaaccgacacaggtgggtgaggagagtatcctaaggccagcgagagaactgttgttaaggaactcggcaaaatgaccccgtaacttagggataaggggtgccaccatcaggtggccgcagagaataggcccaagcgactgtttaccaaaaacataggtttctgctaagtcgcaagacgatgtataggagctgacgcctgcccggtgctggaaggttaaggggatctgttagagcaatcgaagcagtgaacttaagccccagtaaacggcggccgtaactataacggtcctaaggtagcgaaattccttgtcgggtaagttccgacccgcacgaaaggcgtaacgatttgggcactgtctcaacaacagactcggtgaaattgtaattccggtgaagatgccggatacctgcgacaggacggaaagaccccatggagctttactgtagcttgacattgggtcttggtactacatgtacaggataggtgggaggctttgaaaccaggacgccagttttggcggagccatccttgggataccacccttgtagtactgggactctaaccataggccatgaatctggtcttgggacactgtcaggtgggcagtttgactggggcggtcgcctcccaaaaggtaacggaggcgctcaaaggttctctcagtacggtcggaaatcgtacgtagagtgtaaaggcaaaagagagcttgattgcaagacatacaggtcgagcaaggatgaaaatcggacttagtgatccggtggttctgcgtggaagggccatcgctcaacggataaaagctaccctggggataacaggcttatctcccccaagagtccacatcgacggggaggtttggcacctcgatgtcggctcatcacatcctggggctgtagtaggtcccaagggttgggctgttcgcccattaaagtggtacgcgagctgggttcagaacgtcgtgagacagttcggtccctatccgtcgcaggcgtaggaaatttgagaagacctgtccttagtacgagaggaccgggatggacgtacctctggtgtaccagttgtcctgccaagggcatggctgggtagctatgtacggaatggataagcgctgaaagcatctaagcgcgaagccaacttcaagataagatttcccaccgcaagggtaagaccccagaaagactatctggttgataggtcgaaggtgtaagtgcagcaatgtatttagcttatcgatactaataggtcgaggacttgaccaatatttatttgatgttcattcattaagatatatgtgtagtttttagagtgctaactctaaagaaactagtattgctaggttctataaacttattaaaaacttaatagaaatattaagcataaagattatgtggttacaatagcagagaggatacacctgttcccattccgaacacagaagttaagctctctagcgctgatggtacttggtgggaaactgcctgggagagtaggacgtagccacgtaatctttttttatttattaagtttcttattttaaggtactatttttaaagtatgttataaatgctttgtgtaaatacatataatagtttaaagagattgattctttaaatatagggtgagaatccttagaatatgtacccttaaaacctttaaataagaaaggagatagataagtaagtgtctgtaatcaatagttttattttacaatatggattaatctctgtatttgtattaattatgattgagtatgcgcgcgccgggaaatgtgcgcggaacccctatttgtttatttttctaaatacattcaaatatgtatccgctcatgagacaataaccctgataaatgcttcaataatattgaaaaaggaagagtatgagtattcaacatttccgtgtcgcccttattcccttttttgcggcattttgccttcctgtttttgctcacccagaaacgctggtgaaagtaaaagatgctgaagatcagttgggtgcacgagtgggttacatcgaactggatctcaacagcggtaagatccttgagagttttcgccccgaagaacgttttccaatgatgagcacttttaaagttctgctatgtggcgcggtattatcccgtgttgacgccgggcaagagcaactcggtcgccgcatacactattctcagaatgacttggttgagtactcaccagtcacagaaaagcatcttacggatggcatgacagtaagagaattatgcagtgctgcaataaccatgagtgataacactgcggccaacttacttctgacaacgatcggaggaccgaaggagctaaccgcttttttgcacaacatgggggatcatgtaactcgccttgatcgttgggaaccggagctgaatgaagccataccaaacgacgagcgtgacaccacgatgcctgcagcaatggcaacaacgttgcgcaaactattaactggcgaactacttactctagcttcccggcaacaattaatagactggatggaggcggataaagttgcaggaccacttctgcgctcggcccttccggctagctggtttattgctgataaatctggagccggtgagcgtgggtctcgcggtatcattgcagcactggggccagatggtaagccctcccgtatcgtagttatctacacgacggggagtcaggcaactatggatgaacgaaatagacagatcgctgagataggtgcctcactgattaagcattggtaactgcagaccaagtttactcatatatactttagattgatttaaaacttcatttttaatttaaaaggatctaggtgaagatcctttttgataatctcatgaccaaaatcccttaacgtgagttttcgttccactgagcgtcagaccccgtagaaaagatcaaaggatcttcttgagatcctttttttctgcgcgtaatctgctgcttgcaaacaaaaaaaccaccgctaccagcggtggtttgtttgccggatcaagagctaccaactctttttccgaaggtaactggcttcagcagagcgcagataccaaatactgtccttctagtgtagccgtagttaggccaccacttcaagaactctgtagcaccgcctacatacctcgctctgctaatcctgttaccagtggctgctgccagtggcgataagtcgtgtcttaccgggttggactcaagacgatagttaccggataaggcgcagcggtcgggctgaacggggggttcgtgcacacagcccagcttggagcgaacgacctacaccgaactgagatacctacagcgtgagctatgagaaagcgccacgcttcccgaagggagaaaggcggacaggtatccggtaagcggcagggtcggaacaggagagcgcacgagggagcttccagggggaaacgcctggtatctttatagtcctgtcgggtttcgccacctctgacttgagcgtcgatttttgtgatgctcgtcaggggggcggagcctatggaaaaacgccagcaacgcggcctttttacggttcctggccttttgctgg

SEQ ID NO: 109 - DNA, 7372 bp, Artificial
  Synthetic
agacttagggaccctgcggccgccattaattcctaatttttgttgacactctatcattgatagagttattttaccactccctatcagtgatagagaaaagtgaaatgaatagaccggccgctgagaaaaagcgaagcggcactgctctttaacaatttatcagacaatctgtgtgggcactcgaagatacggattcttaacgtcgcaagacgaaaaatgaataccaagtctcaagagtgaacacgtaattcattacgaagtttaattctttgagcgtcaaacttttatttgagagtttgatcctggctcaggatgaacgctggcggcgtgcctaacacatgcaagttgagcgatttacttcggtaaagagcggcggacgggtgagtaacgcgtgggtaacctaccctgtacacacggataacataccgaaaggtatgctaatacgggataatatatttgagaggcatctcttaaatatcaaaggtgagccagtacaggatggacccgcgtctgattagctagttggtaaggtaacggcttaccaaggcgacgatcagtagccgacctgagagggtgatcggccacattggaactgagacacggtccaaactcctacgggaggcagcagtggggaatattgcacaatgggcgaaagcctgatgcagcaacgccgcgtgagtgatgaaggccttcgggtcgtaaaactctgtcctcaaggaagataatgacggtacttgaggaggaagccccggctaactacgtgccagcagccgcggtaatacgtagggggctagcgttatccggatttactgggcgtaaagggtgcgtaggcggtctttcaagtcaggagtgaaaggctacggctcaaccgtagtaagctcttgaaactgggagacttgagtgcaggagaggagagtggaattcctagtgtagcggtgaaatgcgtagatattaggaggaacaccagttgcgaaggcggctctctggactgtaactgacgctgaggcacgaaagcgtggggagcaaacaggattagataccctggtagtccacgctgtaaacgatgagtactaggtgtcgggggttacccccttcggtgccgcagctaacgcattaagtactccgcctgggaagtacgctcgcaagagtgaaactcaaaggaattgacggggacccgcacaagtagcggagcatgtggtttaattcgaagcaacgcgaagaaccttacctaagcttgacatcccaatgacatctccttaatcggagagttcccttcggggacattggtgacaggtggtgcatggttgtcgtcagctcgtgtcgtgagatgttgggttaagtcccgcaacgagcgcaacccttgtctttagttgccatcattaagttgggcactctagagagactgccagggataacctggaggaaggtggggatgacgtcaaatcatcatgccccttatgcttagggctacacacgtgctacaatgggtagtacagagggttgccaagccgtaaggtggagctaatcccttaaagctactctcagttcggattgtaggctgaaactcgcctacatgaagctggagttactagtaatcgcagatcagaatgctgcggtgaatgcgttcccgggtcttgtacacaccgcccgtcacaccacgggagttggagacgcccgaagccgattatctaaccttttggaagaagtcgtcgaaggtggaatcaataactggggtgaagtcgtaacaaggtagccgtatcggaaggtgcggctggatcatgtggtttccttaaagaagcgtactttgtagtgctcacacagattgtctgatagaaagtgaaaagcaaggcgtttacgcgttgggagtgaggctgaagagaataaggccgttcgctttctattaatgaaagctcaccctacacgaaaatatcacgcaacgcgtgataagcaattttcgtgtccccttcgtctagaggcccaggacaccgccctttcacggcggtaacaggggttcgaatcccctaggggacgccacttgctggtttgtgagtgaaagtcgccgaccttaatatctcaaaactcatcttcgggtgatgtttgagatatttgctctttaaaaatctggatcaagctgaaaattgaaacactgaacaacgagagttgttcgtgagtctctcaaattttcgcaacacgatgatgaatcgaaagaaacatcttcgggttgtgaggtcaagttattaagggtgcagggcggatgccttggcactaggagccgatgaaggacgtgataagctgcgataagcttcggggagttgcacgtaaactttgatccgaagatttccgaatgaggaaactcacttagagtaatgtctaagtatcattaagtgaatacatagcttaatgaggggaactcagggaactgaaacatctaagtacctgaaggaagagaaagaaattcgattccgtaagtagcggcgagcgaacgcggattagcccaaaccaataaagttttctttattggggttgcggacatatcataacgaagaggtatcgtaattgaagaggtttggaaagacccaccacagaaggtaatagtcctgtatgttaaacgagaagactttagatatgatccagagtaccacgggacacgtgaaaccctgtgggaagcaggagggaccaccctccaaggctaaatactacctagtgaccgatagcgtatagtaccgtgagggaaaggtgaaaagaaccccgggaggggagtgaaatagaacctgaaaccctgcacttacaagctgtggaagcacatttcttgtgtgaccgcgtactttttgtagaacgggccaacgagttacgttaagtagcaaggttaagcacttaaggtgcggagccgtagcgaaagcgagttttaactgagcgttcagttacttgacgtagacccgaaaccgggcgacctacccatgagcaggatgaagcgaaagtaaaatttcgtggaggtccgaacccacgagcgttgaaaagctcggggatgacttgtgggtagcggtgaaattccaatcgagcccggagatagctggttctccccgaaatagctttagggctagcctcaaggtgagagatacggaggtagagcactgaatgtcctagggggtattgcacctaccgaagactatcaaactccgaatgccgtcatcttatacttgggagtcagactgtgggtgataagattcatagtcgaaagggcaacagcccagatcgtcagctaaggtccctaaatgtaagttaagtggtaaaggatgtgggattgcacagacaaccaggatgttggcttagaagcagccactcattcaaagagtgcgtaatagctcactggtcgagtgatcctgcgccgaagatttccggggctaaaacttactaccgaagctacggcatcagtaatgatgggtaggggagcttcccatacgggttgaagcatgaccgtaaggacatgtggacagtatgggagtgagaatgttggcatgagtagcgagatgtgggtgagaatcccacaggccgtaaacccaaggtttccaggggaaggttcgtctgccctgggttagtcgggacctaagctgaggccgaaaggcgtaggtgatggacaacaggttgatattcctgtactaccgataaccgtttgagagatgggatgacacagtaggataagctaagcacactgttggttatgtgtgcccaagcattgaggcagtcaaagtaggcaaatccgctttgataatgctgggatgtgatggggagcgaaatttagtagcgaagtagctgatttcacactgtcaagaaaagtctctatcgaggttaaaggtacccgtaccgcaaaccgacacaggtgggtgaggagagtatcctaaggccagcgagagaactgttgttaaggaactcggcaaaatgaccccgtaacttagggataaggggtgccaccatcaggtggccgcagagaataggcccaagcgactgtttaccaaaaacataggtttctgctaagtcgcaagacgatgtataggagctgacgcctgcccggtgctggaaggttaaggggatctgttagagcaatcgaagcagtgaacttaagccccagtaaacggcggccgtaactataacggtcctaaggtagcgaaattccttgtcgggtaagttccgacccgcacgaaaggcgtaacgatttgggcactgtctcaacaacagactcggtgaaattgtaattccggtgaagatgccggatacctgcgacaggacggaaagaccccatggagctttactgtagcttgacattgggtcttggtactacatgtacaggataggtgggaggctttgaaaccaggacgccagttttggcggagccatccttgggataccacccttgtagtactgggactctaaccataggccatgaatctggtcttgggacactgtcaggtgggcagtttgactggggcggtcgcctcccaaaaggtaacggaggcgctcaaaggttctctcagtacggtcggaaatcgtacgtagagtgtaaaggcaaaagagagcttgattgcaagacatacaggtcgagcaaggatgaaaatcggacttagtgatccggtggttctgcgtggaagggccatcgctcaacggataaaagctaccctggggataacaggcttatctcccccaagagtccacatcgacggggaggtttggcacctcgatgtcggctcatcacatcctggggctgtagtaggtcccaagggttgggctgttcgcccattaaagtggtacgcgagctgggttcagaacgtcgtgagacagttcggtccctatccgtcgcaggcgtaggaaatttgagaagacctgtccttagtacgagaggaccgggatggacgtacctctggtgtaccagttgtcctgccaagggcatggctgggtagctatgtacggaatggataagcgctgaaagcatctaagcgcgaagccaacttcaagataagatttcccaccgcaagggtaagaccccagaaagactatctggttgataggtcgaaggtgtaagtgcagcaatgtatttagcttatcgatactaataggtcgaggacttgaccaaacaacgccgaagctgttttggcggatgagagaagattttcagcctgatacagattaaatcagaacgcagaagcggtctgataaaacagaatttatgtggttacaatagcagagaggatacacctgttcccattccgaacacagaagttaagctctctagcgctgatggtacttggtgggaaactgcctgggagagtaggacgtagccacgtaacaaataaaacgaaaggctcagtcgaaagactgggcctttcgttttatctgttgtttgtcggtgaacgctctcctgagtaggacaaatccgccgggagcggatttgaacgttgcgaagcaacggcccggagggtggcgggcaggacgcccgccataaactgccaggcatcaaattaagcagaaggccatcctgacggatggcctttttgcgtttctacaaactcttcctgtcgtcatatctacaagccggcgcgccgggaaatgtgcgcggaacccctatttgtttatttttctaaatacattcaaatatgtatccgctcatgagacaataaccctgataaatgcttcaataatattgaaaaaggaagagtatgagtattcaacatttccgtgtcgcccttattcccttttttgcggcattttgccttcctgtttttgctcacccagaaacgctggtgaaagtaaaagatgctgaagatcagttgggtgcacgagtgggttacatcgaactggatctcaacagcggtaagatccttgagagttttcgccccgaagaacgttttccaatgatgagcacttttaaagttctgctatgtggcgcggtattatcccgtgttgacgccgggcaagagcaactcggtcgccgcatacactattctcagaatgacttggttgagtactcaccagtcacagaaaagcatcttacggatggcatgacagtaagagaattatgcagtgctgcaataaccatgagtgataacactgcggccaacttacttctgacaacgatcggaggaccgaaggagctaaccgcttttttgcacaacatgggggatcatgtaactcgccttgatcgttgggaaccggagctgaatgaagccataccaaacgacgagcgtgacaccacgatgcctgcagcaatggcaacaacgttgcgcaaactattaactggcgaactacttactctagcttcccggcaacaattaatagactggatggaggcggataaagttgcaggaccacttctgcgctcggcccttccggctagctggtttattgctgataaatctggagccggtgagcgtgggtctcgcggtatcattgcagcactggggccagatggtaagccctcccgtatcgtagttatctacacgacggggagtcaggcaactatggatgaacgaaatagacagatcgctgagataggtgcctcactgattaagcattggtaactgcagaccaagtttactcatatatactttagattgatttaaaacttcatttttaatttaaaaggatctaggtgaagatcctttttgataatctcatgaccaaaatcccttaacgtgagttttcgttccactgagcgtcagaccccgtagaaaagatcaaaggatcttcttgagatcctttttttctgcgcgtaatctgctgcttgcaaacaaaaaaaccaccgctaccagcggtggtttgtttgccggatcaagagctaccaactctttttccgaaggtaactggcttcagcagagcgcagataccaaatactgtccttctagtgtagccgtagttaggccaccacttcaagaactctgtagcaccgcctacatacctcgctctgctaatcctgttaccagtggctgctgccagtggcgataagtcgtgtcttaccgggttggactcaagacgatagttaccggataaggcgcagcggtcgggctgaacggggggttcgtgcacacagcccagcttggagcgaacgacctacaccgaactgagatacctacagcgtgagctatgagaaagcgccacgcttcccgaagggagaaaggcggacaggtatccggtaagcggcagggtcggaacaggagagcgcacgagggagcttccagggggaaacgcctggtatctttatagtcctgtcgggtttcgccacctctgacttgagcgtcgatttttgtgatgctcgtcaggggggcggagcctatggaaaaacgccagcaacgcggcctttttacggttcctggccttttgctgg

SEQ ID NO: 110 - DNA, 7949 bp, Artificial
  Synthetic
agacttagggaccctgcggccgccattaattcctaatttttgttgacactctatcattgatagagttattttaccactccctatcagtgatagagaaaagtgaaatgaatagaccggccgctgagaaaaagcgaagcggcaaaactgaacaatgataggtaatcaatcataatgattgaacatatgccagagtgcgggttttgacatagtcaaaaccaaccataattcaaagctacttaatggtagcgacaacaaaacaaatgagctattcaaatagcttcaagatatcttggagagtttgatcctggctcaggacgaacgctggcggcgtgcttaacacatgcaagtcgaacgaagagcgatggaagcttgcttctatcaatcttagtggcgaacgggtgagtaacgcgtaatcaacctgcccttcagagggggacaacagttggaaacgactgctaataccgcatacgatctaacctcggcatcgaggatggatgaaaggtggcctctatttataagctatcactgaaggaggggattgcgtctgattagctagttggaggggtaacggcccaccaaggcgatgatcagtagccggtctgagaggatgaacggccacattgggactgagacacggcccagactcctacgggaggcagcagtggggaatcttccgcaatggacgaaagtctgacggagcaacgccgcgtgagtgatgacggccttcgggttgtaaagctctgttaatcgggacgaaaggccttcttgcgaacagttagaaggattgacggtaccggaatagaaagccacggctaactacgtgccagcagccgcggtaatacgtaggtggcaagcgttgtccggaattattgggcgtaaagcgcgcgcaggcggatcagttagtctgtcttaaaagttcggggcttaaccccgtgatgggatggaaactgctgatctagagtatcggagaggaaagtggaattcctagtgtagcggtgaaatgcgtagatattaggaagaacaccagtggcgaaggcgactttctggacgaaaactgacgctgaggcgcgaaagccaggggagcgaacgggattagataccccggtagtcctggccgtaaacgatgggtactaggtgtaggaggtatcgaccccttctgtgccggagttaacgcaataagtaccccgcctggggagtacgaccgcaaggttgaaactcaaaggaattgacgggggcccgcacaagcggtggagtatgtggtttaattcgacgcaacgcgaagaaccttaccaggtcttgacattgatggacagaactagagatagttcctcttcttcggaagccagaaaacaggtggtgcacggttgtcgtcagctcgtgtcgtgagatgttgggttaagtcccgcaacgagcgcaacccctatcttatgttgccagcacttcgggtgggaactcatgagagactgccgcagacaatgcggaggaaggcggggatgacgtcaaatcatcatgccccttatgacctgggctacacacgtactacaatgggagttaatagacggaagcgagatcgcgagatggagcaaacccgagaaacactctctcagttcggatcgtaggctgcaactcgcctacgtgaagtcggaatcgctagtaatcgcaggtcagcatactgcggtgaatacgttcccgggccttgtacacaccgcccgtcacaccacgaaagtcggaagtgcccaaagccggtggggtaaccttcgggagccagccgtctaaggtaaagtcgatgattggggtgaagtcgtaacaaggtagccgtatcggaaggtgcggctggatcatgtggtttctagggagacatacaccaagccaagagcttggatgtcacttaggtcgacactttggccagtaagtagacgtagcataagcgctagctgtacttacatacttatcattgtttggttttgagagatctgtaaagactctcaatctacagatatgggcctatagctcagctggttagagcgcacgcctgataagcgtgaggtcggtggttcgagtccacctaggcccaccagttggctcatataactcgaaatacacttttgtgtagagtacagacattaagagctaaaataataggaaaagcttataaaagataacggattcttcggaatggattatcgagacttaagtgaacccattacgggggcgtagctcagttgggagagcacctgccttgcaagcagggggtcaggagttcgaatctcctcgtctccaccatttagtatttgacagcgagtctgtgatatactaattgtttgttctttgaaaactgcatagaagaattaatatatatttgtaaggtcatctcttagaatttctaagtaggttgacccgagcacataggaaataattctctgacttaatggtgacgtacatgtaaaatgtacggctacaaaaaaacgacaatgtatctaatgcatgtcaatattatctctcatgtattcaatcatgagattttcgttagcatttgatgcatatctaggagcctgagcgagatgaagccgccgcgtactattgtacgtaaggcaaaatcgagcgtgaggcgacgacgataggcgcaaatgataacgcaaaataagtaaagataataagggcgtacggtggatgccttggcgatatcagccgaagaaggacgcggtaagctgcgataagctacggagaggtgcaagcaacctgtgacccgtagatatccgaatgggggaacccggcagtggttatgcactgtcacccatagcatagactatgaggagggcacccggggaactgaaacatctaattacccggaggaacagtaatcaaacgagattttcttagtagcggcgagcgaacgggaaagaggccaaaccggagcgggcaaccgcaccggggttgaggacagtcatcaagtgtaaatgaggtagaagaatcgagctggaaagctcagccgcagaaggtgaaagccctgtaatcgaaaccttgcatacatgggactgtatccagagtaccacgagacacgtgaaaccttgtgggaagcaggggggaccaccctccaagccaaaatactgatatcgaccgatagcgcatagtaccgtgagggaaaggtgaaaagaacccctggcggggagtgaaagagaacctgaaaccgtatgtctacaaacagtcgaagtctgtatatatatcaggacgacggcgtgcctattgaagaatgaaccgacgagttactgttgctagcgaggttaagtggaaaacatggagccgcagcgaaagcgagtctgaacagggcgttcagttagtaatagtagacccgaaaccgtagtgatctatccatggccaggttgaagcacaggtaaaattgtgtggaggaccgaactcgtgagcgttgaaaagctttgggatgagttgtggataggggtgaaatgccaatcgaacacggagatagctggttctccccgaaatagctttagggctagcctcgaggtagagagtataggcggtagagcactgatcgggctaggggccataccggttaccgaacctagtcaaactacgaatggctatacttatactcgggagtcagacagtgaatgataaggtccattgtcaagagggaaacagcccagaacaccgactaaggtccctaatgttacactaagtggcgaaggatgtggaatttccaaaacaaccaggatgttggcttagaagcagccaccatttaaagagtgcgtaatagctcactggtcgagagactctgcgccgaaaatgtccggggctaaagtgtaaaaccgaagtcgtgtcatatgcagcaatgtatatgggtaggggagcgttctcatcgggctgaagcagtaccgtaaggagttgtggactgatgagaagtgagaatgtcggtatgagtagcgaaaagaatggtgagaatccattccaccgaaagcctaagggttcctgagcaacgatcgtcgtctcagggtaagtcgggacctaagccgaggcggaaaagcgtaggcgatggacaacaggttgaaattcctgtaccggtgtgaatcgtttgatcgatggagtgacacagtaaggtaggtcagcacgcgattggaagagcgtgtttaagcaggtaggttgagctataggcaaatccgtagttctaaaagctgagatgtgatgacgagtgactagcaatagtcgcgaagtgattgatcctacactgtcgagaaaagcttctaggtagagacacatcgcccgtaccaaaaccgacacaggtaggcggggagagaatcctaaggtgcgcgggaaaaccctcgttaaggaactcggcaaaatgcctccgtaacttcgggaaaaggaggactcatgtagtgtgaagagcagcaacgcttggagcatgaatgagtggcacaagagaggcgcaagcgactgtttaccacaaacacaggtgcctgctaaagcgaaagctgatgtataggtgctgacacctgcccggtgctggaaggttaagaggaggggttagacttcggtcgaagctctgaattgaagccccagtaaacggcggccgtaactataacggtcctaaggtagcgaaattccttgtcgggtaagttccgacccgcacgaaaggtgtaacgacttgcgcactgtctcaacgagggacccggtgaaattgaagtacctgtgaagatgcaggttacccgcgactggacagaaagaccccatggagctttactgcaacctaagattgaacttagttaatgaatgtacaggataggtgggagacgtagaacctaggacgctagttttaggggagtcgctgttgggataccaccctttcattaattgatttctaacgggccgagtaacgaccggccggacagtcttaggcgggcagtttgactggggcggtcgcctccaaaagagtaacggaggcgcccaaaggttccctcagagcggacggaaatcgctcgaagagtgtaaaggcagaagggagcttgactgcgagacggacaggtcgagcagggacgaaagtcgggcttagtgatccggtggtgccgagtggaagggccatcgctcaacggataaaagctaccctggggataacaggctaatctctcccaagagtccatatcgacggggaggtttggcacctcgatgtcggctcatcacatcctggggctgaagtaggtcccaagggttcggctgttcgccgattaaagtggtacgtgagctgggttcagaacgtcgtgagacagttcggtccctatccatcgcgggcgcaagaaacttgaagggggctgctcctagtacgagaggaccggagtggacgaaccgctggtgtaccaattatcctgccaagggtacagttgggtagctacgttcgggacggataaacgctgaaagcatctaagcgtgaaaccagccttgagatgaggtttctcatagcataagctagtaagatcccatgtagacgacatggtagataggccaggtgtggaagagccgtgaggtttggagctgactggtactaatcgatcgagggctttacttaagcagcgtaaccaacttgaaggagcaacgcgacgcacaagttgcgtggagtcgcttacgtcgaaacgtaagatttcacgatgtgaaatccacaggcttcgacgcaatcctctagacgtgtactttgagtatgggacgcaacatataacaaaacattaagcagaatgtgcaacaaatatatatacttctatgtggttttcagagtacaaactctgacagattcagtggcgatggctatgaggatccacctgttcccatctcgaacacagtagttaagctcataaacgccgaaagtacttggctggagacggcctgggaggataggaagctgctgattgaagcatacaatagagggtcaacccaaaagagttggccctctatttttgtgctctaatgagcacattctaattccttctagagccgttttcaggcaaggttgtagaagtatggtctatgtgtattaatcaataagacggcgtgggaaaagtagggcagtagaagatggaggagtaaaacgacgacagattcactgcatcactttcttccgaacgtaagatttaccgaactgcgaagcagtgaaggaaaagcgcgccgggaaatgtgcgcggaacccctatttgtttatttttctaaatacattcaaatatgtatccgctcatgagacaataaccctgataaatgcttcaataatattgaaaaaggaagagtatgagtattcaacatttccgtgtcgcccttattcccttttttgcggcattttgccttcctgtttttgctcacccagaaacgctggtgaaagtaaaagatgctgaagatcagttgggtgcacgagtgggttacatcgaactggatctcaacagcggtaagatccttgagagttttcgccccgaagaacgttttccaatgatgagcacttttaaagttctgctatgtggcgcggtattatcccgtgttgacgccgggcaagagcaactcggtcgccgcatacactattctcagaatgacttggttgagtactcaccagtcacagaaaagcatcttacggatggcatgacagtaagagaattatgcagtgctgcaataaccatgagtgataacactgcggccaacttacttctgacaacgatcggaggaccgaaggagctaaccgcttttttgcacaacatgggggatcatgtaactcgccttgatcgttgggaaccggagctgaatgaagccataccaaacgacgagcgtgacaccacgatgcctgcagcaatggcaacaacgttgcgcaaactattaactggcgaactacttactctagcttcccggcaacaattaatagactggatggaggcggataaagttgcaggaccacttctgcgctcggcccttccggctagctggtttattgctgataaatctggagccggtgagcgtgggtctcgcggtatcattgcagcactggggccagatggtaagccctcccgtatcgtagttatctacacgacggggagtcaggcaactatggatgaacgaaatagacagatcgctgagataggtgcctcactgattaagcattggtaactgcagaccaagtttactcatatatactttagattgatttaaaacttcatttttaatttaaaaggatctaggtgaagatcctttttgataatctcatgaccaaaatcccttaacgtgagttttcgttccactgagcgtcagaccccgtagaaaagatcaaaggatcttcttgagatcctttttttctgcgcgtaatctgctgcttgcaaacaaaaaaaccaccgctaccagcggtggtttgtttgccggatcaagagctaccaactctttttccgaaggtaactggcttcagcagagcgcagataccaaatactgtccttctagtgtagccgtagttaggccaccacttcaagaactctgtagcaccgcctacatacctcgctctgctaatcctgttaccagtggctgctgccagtggcgataagtcgtgtcttaccgggttggactcaagacgatagttaccggataaggcgcagcggtcgggctgaacggggggttcgtgcacacagcccagcttggagcgaacgacctacaccgaactgagatacctacagcgtgagctatgagaaagcgccacgcttcccgaagggagaaaggcggacaggtatccggtaagcggcagggtcggaacaggagagcgcacgagggagcttccagggggaaacgcctggtatctttatagtcctgtcgggtttcgccacctctgacttgagcgtcgatttttgtgatgctcgtcaggggggcggagcctatggaaaaacgccagcaacgcggcctttttacggttcctggccttttgctgg

SEQ ID NO: 111 - DNA, 7471 bp, Artificial
  Synthetic
agacttagggaccctgcggccgccattaattcctaatttttgttgacactctatcattgatagagttattttaccactccctatcagtgatagagaaaagtgaaatgaatagaccggccgctgagaaaaagcgaagcggcactgctctttaacaatttatcagacaatctgtgtgggcactcgaagatacggattcttaacgtcgcaagacgaaaaatgaataccaagtctcaagagtgaacacgtaattcattacgaagtttaattctttgagcgtcaaacttttatcttggagagtttgatcctggctcaggacgaacgctggcggcgtgcttaacacatgcaagtcgaacgaagagcgatggaagcttgcttctatcaatcttagtggcgaacgggtgagtaacgcgtaatcaacctgcccttcagagggggacaacagttggaaacgactgctaataccgcatacgatctaacctcggcatcgaggatggatgaaaggtggcctctatttataagctatcactgaaggaggggattgcgtctgattagctagttggaggggtaacggcccaccaaggcgatgatcagtagccggtctgagaggatgaacggccacattgggactgagacacggcccagactcctacgggaggcagcagtggggaatcttccgcaatggacgaaagtctgacggagcaacgccgcgtgagtgatgacggccttcgggttgtaaagctctgttaatcgggacgaaaggccttcttgcgaacagttagaaggattgacggtaccggaatagaaagccacggctaactacgtgccagcagccgcggtaatacgtaggtggcaagcgttgtccggaattattgggcgtaaagcgcgcgcaggcggatcagttagtctgtcttaaaagttcggggcttaaccccgtgatgggatggaaactgctgatctagagtatcggagaggaaagtggaattcctagtgtagcggtgaaatgcgtagatattaggaagaacaccagtggcgaaggcgactttctggacgaaaactgacgctgaggcgcgaaagccaggggagcgaacgggattagataccccggtagtcctggccgtaaacgatgggtactaggtgtaggaggtatcgaccccttctgtgccggagttaacgcaataagtaccccgcctggggagtacgaccgcaaggttgaaactcaaaggaattgacgggggcccgcacaagcggtggagtatgtggtttaattcgacgcaacgcgaagaaccttaccaggtcttgacattgatggacagaactagagatagttcctcttcttcggaagccagaaaacaggtggtgcacggttgtcgtcagctcgtgtcgtgagatgttgggttaagtcccgcaacgagcgcaacccctatcttatgttgccagcacttcgggtgggaactcatgagagactgccgcagacaatgcggaggaaggcggggatgacgtcaaatcatcatgccccttatgacctgggctacacacgtactacaatgggagttaatagacggaagcgagatcgcgagatggagcaaacccgagaaacactctctcagttcggatcgtaggctgcaactcgcctacgtgaagtcggaatcgctagtaatcgcaggtcagcatactgcggtgaatacgttcccgggccttgtacacaccgcccgtcacaccacgaaagtcggaagtgcccaaagccggtggggtaaccttcgggagccagccgtctaaggtaaagtcgatgattggggtgaagtcgtaacaaggtagccgtatcggaaggtgcggctggatcatgtggtttccttaaagaagcgtactttgtagtgctcacacagattgtctgatagaaagtgaaaagcaaggcgtttacgcgttgggagtgaggctgaagagaataaggccgttcgctttctattaatgaaagctcaccctacacgaaaatatcacgcaacgcgtgataagcaattttcgtgtccccttcgtctagaggcccaggacaccgccctttcacggcggtaacaggggttcgaatcccctaggggacgccacttgctggtttgtgagtgaaagtcgccgaccttaatatctcaaaactcatcttcgggtgatgtttgagatatttgctctttaaaaatctggatcaagctgaaaattgaaacactgaacaacgagagttgttcgtgagtctctcaaattttcgcaacacgatgatgaatcgaaagaaacatcttcgggttgtgaagtaaagataataagggcgtacggtggatgccttggcgatatcagccgaagaaggacgcggtaagctgcgataagctacggagaggtgcaagcaacctgtgacccgtagatatccgaatgggggaacccggcagtggttatgcactgtcacccatagcatagactatgaggagggcacccggggaactgaaacatctaattacccggaggaacagtaatcaaacgagattttcttagtagcggcgagcgaacgggaaagaggccaaaccggagcgggcaaccgcaccggggttgaggacagtcatcaagtgtaaatgaggtagaagaatcgagctggaaagctcagccgcagaaggtgaaagccctgtaatcgaaaccttgcatacatgggactgtatccagagtaccacgagacacgtgaaaccttgtgggaagcaggggggaccaccctccaagccaaaatactgatatcgaccgatagcgcatagtaccgtgagggaaaggtgaaaagaacccctggcggggagtgaaagagaacctgaaaccgtatgtctacaaacagtcgaagtctgtatatatatcaggacgacggcgtgcctattgaagaatgaaccgacgagttactgttgctagcgaggttaagtggaaaacatggagccgcagcgaaagcgagtctgaacagggcgttcagttagtaatagtagacccgaaaccgtagtgatctatccatggccaggttgaagcacaggtaaaattgtgtggaggaccgaactcgtgagcgttgaaaagctttgggatgagttgtggataggggtgaaatgccaatcgaacacggagatagctggttctccccgaaatagctttagggctagcctcgaggtagagagtataggcggtagagcactgatcgggctaggggccataccggttaccgaacctagtcaaactacgaatggctatacttatactcgggagtcagacagtgaatgataaggtccattgtcaagagggaaacagcccagaacaccgactaaggtccctaatgttacactaagtggcgaaggatgtggaatttccaaaacaaccaggatgttggcttagaagcagccaccatttaaagagtgcgtaatagctcactggtcgagagactctgcgccgaaaatgtccggggctaaagtgtaaaaccgaagtcgtgtcatatgcagcaatgtatatgggtaggggagcgttctcatcgggctgaagcagtaccgtaaggagttgtggactgatgagaagtgagaatgtcggtatgagtagcgaaaagaatggtgagaatccattccaccgaaagcctaagggttcctgagcaacgatcgtcgtctcagggtaagtcgggacctaagccgaggcggaaaagcgtaggcgatggacaacaggttgaaattcctgtaccggtgtgaatcgtttgatcgatggagtgacacagtaaggtaggtcagcacgcgattggaagagcgtgtttaagcaggtaggttgagctataggcaaatccgtagttctaaaagctgagatgtgatgacgagtgactagcaatagtcgcgaagtgattgatcctacactgtcgagaaaagcttctaggtagagacacatcgcccgtaccaaaaccgacacaggtaggcggggagagaatcctaaggtgcgcgggaaaaccctcgttaaggaactcggcaaaatgcctccgtaacttcgggaaaaggaggactcatgtagtgtgaagagcagcaacgcttggagcatgaatgagtggcacaagagaggcgcaagcgactgtttaccacaaacacaggtgcctgctaaagcgaaagctgatgtataggtgctgacacctgcccggtgctggaaggttaagaggaggggttagacttcggtcgaagctctgaattgaagccccagtaaacggcggccgtaactataacggtcctaaggtagcgaaattccttgtcgggtaagttccgacccgcacgaaaggtgtaacgacttgcgcactgtctcaacgagggacccggtgaaattgaagtacctgtgaagatgcaggttacccgcgactggacagaaagaccccatggagctttactgcaacctaagattgaacttagttaatgaatgtacaggataggtgggagacgtagaacctaggacgctagttttaggggagtcgctgttgggataccaccctttcattaattgatttctaacgggccgagtaacgaccggccggacagtcttaggcgggcagtttgactggggcggtcgcctccaaaagagtaacggaggcgcccaaaggttccctcagagcggacggaaatcgctcgaagagtgtaaaggcagaagggagcttgactgcgagacggacaggtcgagcagggacgaaagtcgggcttagtgatccggtggtgccgagtggaagggccatcgctcaacggataaaagctaccctggggataacaggctaatctctcccaagagtccatatcgacggggaggtttggcacctcgatgtcggctcatcacatcctggggctgaagtaggtcccaagggttcggctgttcgccgattaaagtggtacgtgagctgggttcagaacgtcgtgagacagttcggtccctatccatcgcgggcgcaagaaacttgaagggggctgctcctagtacgagaggaccggagtggacgaaccgctggtgtaccaattatcctgccaagggtacagttgggtagctacgttcgggacggataaacgctgaaagcatctaagcgtgaaaccagccttgagatgaggtttctcatagcataagctagtaagatcccatgtagacgacatggtagataggccaggtgtggaagagccgtgaggtttggagctgactggtactaatcgatcgagggctttacttaaacaacgccgaagctgttttggcggatgagagaagattttcagcctgatacagattaaatcagaacgcagaagcggtctgataaaacagaattattcagtggcgatggctatgaggatccacctgttcccatctcgaacacagtagttaagctcataaacgccgaaagtacttggctggagacggcctgggaggataggaagctgctgattgacaaataaaacgaaaggctcagtcgaaagactgggcctttcgttttatctgttgtttgtcggtgaacgctctcctgagtaggacaaatccgccgggagcggatttgaacgttgcgaagcaacggcccggagggtggcgggcaggacgcccgccataaactgccaggcatcaaattaagcagaaggccatcctgacggatggcctttttgcgtttctacaaactcttcctgtcgtcatatctacaagccggcgcgccgggaaatgtgcgcggaacccctatttgtttatttttctaaatacattcaaatatgtatccgctcatgagacaataaccctgataaatgcttcaataatattgaaaaaggaagagtatgagtattcaacatttccgtgtcgcccttattcccttttttgcggcattttgccttcctgtttttgctcacccagaaacgctggtgaaagtaaaagatgctgaagatcagttgggtgcacgagtgggttacatcgaactggatctcaacagcggtaagatccttgagagttttcgccccgaagaacgttttccaatgatgagcacttttaaagttctgctatgtggcgcggtattatcccgtgttgacgccgggcaagagcaactcggtcgccgcatacactattctcagaatgacttggttgagtactcaccagtcacagaaaagcatcttacggatggcatgacagtaagagaattatgcagtgctgcaataaccatgagtgataacactgcggccaacttacttctgacaacgatcggaggaccgaaggagctaaccgcttttttgcacaacatgggggatcatgtaactcgccttgatcgttgggaaccggagctgaatgaagccataccaaacgacgagcgtgacaccacgatgcctgcagcaatggcaacaacgttgcgcaaactattaactggcgaactacttactctagcttcccggcaacaattaatagactggatggaggcggataaagttgcaggaccacttctgcgctcggcccttccggctagctggtttattgctgataaatctggagccggtgagcgtgggtctcgcggtatcattgcagcactggggccagatggtaagccctcccgtatcgtagttatctacacgacggggagtcaggcaactatggatgaacgaaatagacagatcgctgagataggtgcctcactgattaagcattggtaactgcagaccaagtttactcatatatactttagattgatttaaaacttcatttttaatttaaaaggatctaggtgaagatcctttttgataatctcatgaccaaaatcccttaacgtgagttttcgttccactgagcgtcagaccccgtagaaaagatcaaaggatcttcttgagatcctttttttctgcgcgtaatctgctgcttgcaaacaaaaaaaccaccgctaccagcggtggtttgtttgccggatcaagagctaccaactctttttccgaaggtaactggcttcagcagagcgcagataccaaatactgtccttctagtgtagccgtagttaggccaccacttcaagaactctgtagcaccgcctacatacctcgctctgctaatcctgttaccagtggctgctgccagtggcgataagtcgtgtcttaccgggttggactcaagacgatagttaccggataaggcgcagcggtcgggctgaacggggggttcgtgcacacagcccagcttggagcgaacgacctacaccgaactgagatacctacagcgtgagctatgagaaagcgccacgcttcccgaagggagaaaggcggacaggtatccggtaagcggcagggtcggaacaggagagcgcacgagggagcttccagggggaaacgcctggtatctttatagtcctgtcgggtttcgccacctctgacttgagcgtcgatttttgtgatgctcgtcaggggggcggagcctatggaaaaacgccagcaacgcggcctttttacggttcctggccttttgctgg

SEQ ID NO: 112 - DNA, 7625 bp, Artificial
  Synthetic
agacttagggaccctgcggccgccattaattcctaatttttgttgacactctatcattgatagagttattttaccactccctatcagtgatagagaaaagtgaaatgaatagaccggccgctgagaaaaagcgaagcggctcatttctcgcctgatcgcctgtcgtggtggttgggtacccgggagggtttgatgaggggtgaggttttttgagggcgtccttccttaaggacgtgctcgtcaatttttgttttgagagtcatctgtcgatgtctcttcgcatttttttgtggagggttcgattctggctcaggatgaacgctggcggcgtgcttaacacatgcaagtcgaacgggatccatcgggctttgcttggtggtgagagtggcgaacgggtgagtaatgcgtgaccgacctgccccatacaccggaatagctcctggaaacgggtggtaatgccggatgttccagttgatcgcatggtcttctgggaaagctttcgcggtatgggatggggtcgcgtcctatcagcttgacggcggggtaacggcccaccgtggcttcgacgggtagccggcctgagagggcgaccggccacattgggactgagatacggcccagactcctacgggaggcagcagtggggaatattgcacaatgggcgcaagcctgatgcagcgacgccgcgtgagggatggaggccttcgggttgtaaacctcttttatcggggagcaagcgtgagtgagtttacccgttgaataagcaccggctaactacgtgccagcagccgcggtaatacgtagggtgcaagcgttatccggaattattgggcgtaaagggctcgtaggcggttcgtcgcgtccggtgtgaaagtccatcgcttaacggtggatccgcgccgggtacgggcgggcttgagtgcggtaggggagactggaattcccggtgtaacggtggaatgtgtagatatcgggaagaacaccaatggcgaaggcaggtctctgggccgttactgacgctgaggagcgaaagcgtggggagcgaacaggattagataccctggtagtccacgccgtaaacggtggatgctggatgtggggcccgttccacgggttccgtgtcggagctaacgcgttaagcatcccgcctggggagtacggccgcaaggctaaaactcaaagaaattgacgggggcccgcacaagcggcggagcatgcggattaattcgatgcaacgcgaagaaccttacctgggcttgacatgttcccgacgatcccagagatggggtttcccttcggggcgggttcacaggtggtgcatggtcgtcgtcagctcgtgtcgtgagatgttgggttaagtcccgcaacgagcgcaaccctcgccccgtgttgccagcggattgtgccgggaactcacgggggaccgccggggttaactcggaggaaggtggggatgacgtcagatcatcatgccccttacgtccagggcttcacgcatgctacaatggccggtacaacgggatgcgacgcggcgacgcggagcggatccctgaaaaccggtctcagttcggatcgcagtctgcaactcgactgcgtgaaggcggagtcgctagtaatcgcgaatcagcaacgtcgcggtgaatgcgttcccgggccttgtacacaccgcccgtcaagtcatgaaagtgggcagcacccgaagccggtggcctaaccccttgtgggatggagccgtctaaggtgaggctcgtgattgggactaagtcgtaacaaggtagccgtaccggaaggtgcggctggatcatgtggtttctacggagaatacaggatgccgttcggcgtccggtgcggaccctcccgcgcgatggtcgcgtgtggacgggttgctggtgtggaagagatcatgggctttcggttcgtccgtcgtgggatgttccgcgggggtggtgcggatgcgcttttgggctcccggatcgccaccccaggcttttgcctggcgcgattcgatgcccgtcgtgcctgcgggccggccgtgtgccggtctggttggcgtggcggtgcgtggtggcttgagaactggatagtggacgcgagcaaaacaatggttttgaatctttgttttgctgttgatttcgaatcgaactctattgttcgtttcgatcgttttgtgatcatttttagtgtgatgatttgtcgtctgggaatttgctagaggaatcttgcggccatgcaccttcatggtgtgtgttgcttgcaagggcgtatggtggatgccttggcagacaggaccgatgaaggacgtttgaggctgcgataagcctcggggagccgcctacagggctttgatccgaggatttccgaatgggggaacccaccggccgtcatgggtcggtaccggcttcggccggggggtacgcagggaagtgaaacatctcagtacctgcaggaaaggatattccgtgagtagtggcgagcgaaagcggatgatggccaaaccttgcgcgtgtgatacccgtcgggggttgcgtgtggggtgttgcgggatcgcgtgtgccggctccgacgggccggccggcagttgtagaaaaccatgtgtcaggggaaccgggttgaataccgggccgcagagggtgagggccccgtacctgaacgcgcatggtctgccgatcgcgtctcccaagtagcacgggtcccgtggaaccccgtgcgaatccgcccggaccgtcgggtaagcctgaatattcctgtctgaccgatagcgaacgagtaccgtgagggaaaggtgaaaagtaccccgggaggggagtgaaacagtctctgaaaccgtgcgcctacaatccgtcggagcctctttgtggggtgacggcgtgcctatcgaaaaatgagtctgcgagtcagtggcatgtggcgagcataacccgtgtggggtatgcgtagcgaaggcgagtcttaaaaggcgtttaaagtcgcgtgtcctggacccgaagcgggatgatctagccctgagcaggttgaagcgcgggtaagaccgtgtggaggaccgaacccacctgggttgaaaaccggggggatgacttggggttaggggtgaaaggccaatcaaattccgtgatagctggttctctccgaaatgcatttgggtgcagcgtcgggtcattgcgtcccgggggtagagctactggatgcttgcgggcccgtatcgggtaccaacagcaaccaaactccgaataccggtgacgtgtatcccggcagtgagtcggcgggggataagcttcgtcgtcgaaagggaaacagcccagaccgtcgtctaaggtcccgaagcgtgtgctaagtgggaaaggatgtggagtcgcatagacagccaggaggttggctcagaagcagccatccttgaaagagtgcgtaacagctcactggtctagtggttccgcgccgacaatgtagcggggctcaagcacaccaccgaagacgcggcagtattttgtactgggtaggagagcgtcccatgaggggcgaagcggccgtgtgaacgcgccgtggacttcatgggagtgagaatgcagacatgagtagcgaaagacgggtgaagatcccgtccgctggatgaccaagggttccagggccacgttcatcgtccctgggtgagtcgggtcctaaggcgaggccgacaggcgtagtcgaatggatgaacgggtcgatattcccgtaccggctttcagccgccagaaccgaggcttggagtactaacctccgggtccgggcttgcttccccttcgggggtgggatgcctgggcctgttgggaccgatccttgtagtaggtcagcgcaggagtgacgcagaagggtagccggccgcggaggtggttttccgtggtcaagcacgcagcccgtcccgtaggcaaatccgcggggcgtgtgggcgaggtgcgatggtgggggccttgtggcccgatatccggtgatcccggctgccgagaaaagcttcggcgtgaggctcgaagccgcccgtaccccaaaccgacactggtggtcaggtagagaataccaaagcgatcgagcgaatcctggtcaaggaactcggcaaatcactcccgttccttcggtttaagggagacccccgatggtgagccgcctcgcgcggggagcttttgggggtggcacagaccagggggtagcgactgtttaccaaaaacacaggtgcatgcgaaggcgcaagccgctgtatatgcactgacgcctgcccggtgccggaaggttaagaggatccgtcagccttcgggtgaagcggtgaattcaagccccggtaaacggcggtggtaactataaccatcctaaggtagcgaaattccttgtcgggtaagttccgacctgcacgaatggcgtaacgacttccccactgtctcgaccaggagctcggcgaaattgcagtacgagtaaagatgctcgttaagcgcagaaggacgaaaagaccccgggacctttactataccttggtattggcattcggtgtggattgtgtagcataggcgggaggccgagaggcatggtcgccagatcgtgcggagccgcaaggtgaaataccgctctgttcgcattggatgtctaacctcgaacagtgatcctgttcagggacagtgcctggcgggtagtttaactggggcggttgcctcccaaagagtaacggaggcgcccaaaggtccgctcagcccggttggcaatcgggtggcgagtgcaagtgcacaagcgggcttgactgcgaggacgacggtccgagcagggacgaaagtcgggactagtgatccggtgccggtgtacggacgcggcatcgctcaacggataaaaggtaccccggggataacaggctgatcattcccaagagtccatatcgacgggatggtttggcacctcgatgtcggctcgtcgcatcctggggctggagcaggtcccaagggttcggctgttcgccgattaaagcggcacgcgagctgggttcagaacgtcgtgagacagtttggtctctatcctctgcgctcgttggaatgttgaggaggcctgcccatagtacgagaggacctgggtggacgaacctctggtatgccggttgtcacgccagtggcacggccggttggctacgttcggaagggataaccgctgaaagcatctaagcgggaagcctgctccaagataagcattccgtgcagcctcgggctgctgtagtccccatgcagaacacgtggtcgataggccggacgtggaagccccgcgaggggtggagccgaccggtactaacggacgaaaggcaacactattattcccctgattcgttcggggaccgcatcatcctcctgcaaaccatcccgtatggcaatgagcacgggatgaacacaagacgaaacatcaacgaattcgcgtcccctgtccggttcccgggccgccacaggccggcagaccttggtgtctgaccgtataagagaagatttgcggcggtcatggcccaggtgagacgcccggtcccattccgaacccggaagctaaggcctggcacggcgatggtactgcacccgacagggtgtgggagagtagcacgccgccgcaccacacgtacaggaagccccgataccttgaaggtaccggggcttcccgcatatccgaaaccaacaagacaagacaccgacaagatataggctctcgcaactagggtgcggccgaatcgtaagcatatagaagagggaaccctcaagtgacggagagttccctctttgcgtatctggacctataaaggtctagaaattgaaattgtcaggatcggcaccgttgcgcttgccggtgttgatggcgggcgcgccgggaaatgtgcgcggaacccctatttgtttatttttctaaatacattcaaatatgtatccgctcatgagacaataaccctgataaatgcttcaataatattgaaaaaggaagagtatgagtattcaacatttccgtgtcgcccttattcccttttttgcggcattttgccttcctgtttttgctcacccagaaacgctggtgaaagtaaaagatgctgaagatcagttgggtgcacgagtgggttacatcgaactggatctcaacagcggtaagatccttgagagttttcgccccgaagaacgttttccaatgatgagcacttttaaagttctgctatgtggcgcggtattatcccgtgttgacgccgggcaagagcaactcggtcgccgcatacactattctcagaatgacttggttgagtactcaccagtcacagaaaagcatcttacggatggcatgacagtaagagaattatgcagtgctgcaataaccatgagtgataacactgcggccaacttacttctgacaacgatcggaggaccgaaggagctaaccgcttttttgcacaacatgggggatcatgtaactcgccttgatcgttgggaaccggagctgaatgaagccataccaaacgacgagcgtgacaccacgatgcctgcagcaatggcaacaacgttgcgcaaactattaactggcgaactacttactctagcttcccggcaacaattaatagactggatggaggcggataaagttgcaggaccacttctgcgctcggcccttccggctagctggtttattgctgataaatctggagccggtgagcgtgggtctcgcggtatcattgcagcactggggccagatggtaagccctcccgtatcgtagttatctacacgacggggagtcaggcaactatggatgaacgaaatagacagatcgctgagataggtgcctcactgattaagcattggtaactgcagaccaagtttactcatatatactttagattgatttaaaacttcatttttaatttaaaaggatctaggtgaagatcctttttgataatctcatgaccaaaatcccttaacgtgagttttcgttccactgagcgtcagaccccgtagaaaagatcaaaggatcttcttgagatcctttttttctgcgcgtaatctgctgcttgcaaacaaaaaaaccaccgctaccagcggtggtttgtttgccggatcaagagctaccaactctttttccgaaggtaactggcttcagcagagcgcagataccaaatactgtccttctagtgtagccgtagttaggccaccacttcaagaactctgtagcaccgcctacatacctcgctctgctaatcctgttaccagtggctgctgccagtggcgataagtcgtgtcttaccgggttggactcaagacgatagttaccggataaggcgcagcggtcgggctgaacggggggttcgtgcacacagcccagcttggagcgaacgacctacaccgaactgagatacctacagcgtgagctatgagaaagcgccacgcttcccgaagggagaaaggcggacaggtatccggtaagcggcagggtcggaacaggagagcgcacgagggagcttccagggggaaacgcctggtatctttatagtcctgtcgggtttcgccacctctgacttgagcgtcgatttttgtgatgctcgtcaggggggcggagcctatggaaaaacgccagcaacgcggcctttttacggttcctggccttttgctgg

SEQ ID NO: 113 - DNA, 7561 bp, Artificial
  Synthetic
agacttagggaccctgcggccgccattaattcctaatttttgttgacactctatcattgatagagttattttaccactccctatcagtgatagagaaaagtgaaatgaatagaccggccgctgagaaaaagcgaagcggcactgctctttaacaatttatcagacaatctgtgtgggcactcgaagatacggattcttaacgtcgcaagacgaaaaatgaataccaagtctcaagagtgaacacgtaattcattacgaagtttaattctttgagcgtcaaactttttttgtggagggttcgattctggctcaggatgaacgctggcggcgtgcttaacacatgcaagtcgaacgggatccatcgggctttgcttggtggtgagagtggcgaacgggtgagtaatgcgtgaccgacctgccccatacaccggaatagctcctggaaacgggtggtaatgccggatgttccagttgatcgcatggtcttctgggaaagctttcgcggtatgggatggggtcgcgtcctatcagcttgacggcggggtaacggcccaccgtggcttcgacgggtagccggcctgagagggcgaccggccacattgggactgagatacggcccagactcctacgggaggcagcagtggggaatattgcacaatgggcgcaagcctgatgcagcgacgccgcgtgagggatggaggccttcgggttgtaaacctcttttatcggggagcaagcgtgagtgagtttacccgttgaataagcaccggctaactacgtgccagcagccgcggtaatacgtagggtgcaagcgttatccggaattattgggcgtaaagggctcgtaggcggttcgtcgcgtccggtgtgaaagtccatcgcttaacggtggatccgcgccgggtacgggcgggcttgagtgcggtaggggagactggaattcccggtgtaacggtggaatgtgtagatatcgggaagaacaccaatggcgaaggcaggtctctgggccgttactgacgctgaggagcgaaagcgtggggagcgaacaggattagataccctggtagtccacgccgtaaacggtggatgctggatgtggggcccgttccacgggttccgtgtcggagctaacgcgttaagcatcccgcctggggagtacggccgcaaggctaaaactcaaagaaattgacgggggcccgcacaagcggcggagcatgcggattaattcgatgcaacgcgaagaaccttacctgggcttgacatgttcccgacgatcccagagatggggtttcccttcggggcgggttcacaggtggtgcatggtcgtcgtcagctcgtgtcgtgagatgttgggttaagtcccgcaacgagcgcaaccctcgccccgtgttgccagcggattgtgccgggaactcacgggggaccgccggggttaactcggaggaaggtggggatgacgtcagatcatcatgccccttacgtccagggcttcacgcatgctacaatggccggtacaacgggatgcgacgcggcgacgcggagcggatccctgaaaaccggtctcagttcggatcgcagtctgcaactcgactgcgtgaaggcggagtcgctagtaatcgcgaatcagcaacgtcgcggtgaatgcgttcccgggccttgtacacaccgcccgtcaagtcatgaaagtgggcagcacccgaagccggtggcctaaccccttgtgggatggagccgtctaaggtgaggctcgtgattgggactaagtcgtaacaaggtagccgtaccggaaggtgcggctggatcatgtggtttccttaaagaagcgtactttgtagtgctcacacagattgtctgatagaaagtgaaaagcaaggcgtttacgcgttgggagtgaggctgaagagaataaggccgttcgctttctattaatgaaagctcaccctacacgaaaatatcacgcaacgcgtgataagcaattttcgtgtccccttcgtctagaggcccaggacaccgccctttcacggcggtaacaggggttcgaatcccctaggggacgccacttgctggtttgtgagtgaaagtcgccgaccttaatatctcaaaactcatcttcgggtgatgtttgagatatttgctctttaaaaatctggatcaagctgaaaattgaaacactgaacaacgagagttgttcgtgagtctctcaaattttcgcaacacgatgatgaatcgaaagaaacatcttcgggttgtgatgtgttgcttgcaagggcgtatggtggatgccttggcagacaggaccgatgaaggacgtttgaggctgcgataagcctcggggagccgcctacagggctttgatccgaggatttccgaatgggggaacccaccggccgtcatgggtcggtaccggcttcggccggggggtacgcagggaagtgaaacatctcagtacctgcaggaaaggatattccgtgagtagtggcgagcgaaagcggatgatggccaaaccttgcgcgtgtgatacccgtcgggggttgcgtgtggggtgttgcgggatcgcgtgtgccggctccgacgggccggccggcagttgtagaaaaccatgtgtcaggggaaccgggttgaataccgggccgcagagggtgagggccccgtacctgaacgcgcatggtctgccgatcgcgtctcccaagtagcacgggtcccgtggaaccccgtgcgaatccgcccggaccgtcgggtaagcctgaatattcctgtctgaccgatagcgaacgagtaccgtgagggaaaggtgaaaagtaccccgggaggggagtgaaacagtctctgaaaccgtgcgcctacaatccgtcggagcctctttgtggggtgacggcgtgcctatcgaaaaatgagtctgcgagtcagtggcatgtggcgagcataacccgtgtggggtatgcgtagcgaaggcgagtcttaaaaggcgtttaaagtcgcgtgtcctggacccgaagcgggatgatctagccctgagcaggttgaagcgcgggtaagaccgtgtggaggaccgaacccacctgggttgaaaaccggggggatgacttggggttaggggtgaaaggccaatcaaattccgtgatagctggttctctccgaaatgcatttgggtgcagcgtcgggtcattgcgtcccgggggtagagctactggatgcttgcgggcccgtatcgggtaccaacagcaaccaaactccgaataccggtgacgtgtatcccggcagtgagtcggcgggggataagcttcgtcgtcgaaagggaaacagcccagaccgtcgtctaaggtcccgaagcgtgtgctaagtgggaaaggatgtggagtcgcatagacagccaggaggttggctcagaagcagccatccttgaaagagtgcgtaacagctcactggtctagtggttccgcgccgacaatgtagcggggctcaagcacaccaccgaagacgcggcagtattttgtactgggtaggagagcgtcccatgaggggcgaagcggccgtgtgaacgcgccgtggacttcatgggagtgagaatgcagacatgagtagcgaaagacgggtgaagatcccgtccgctggatgaccaagggttccagggccacgttcatcgtccctgggtgagtcgggtcctaaggcgaggccgacaggcgtagtcgaatggatgaacgggtcgatattcccgtaccggctttcagccgccagaaccgaggcttggagtactaacctccgggtccgggcttgcttccccttcgggggtgggatgcctgggcctgttgggaccgatccttgtagtaggtcagcgcaggagtgacgcagaagggtagccggccgcggaggtggttttccgtggtcaagcacgcagcccgtcccgtaggcaaatccgcggggcgtgtgggcgaggtgcgatggtgggggccttgtggcccgatatccggtgatcccggctgccgagaaaagcttcggcgtgaggctcgaagccgcccgtaccccaaaccgacactggtggtcaggtagagaataccaaagcgatcgagcgaatcctggtcaaggaactcggcaaatcactcccgttccttcggtttaagggagacccccgatggtgagccgcctcgcgcggggagcttttgggggtggcacagaccagggggtagcgactgtttaccaaaaacacaggtgcatgcgaaggcgcaagccgctgtatatgcactgacgcctgcccggtgccggaaggttaagaggatccgtcagccttcgggtgaagcggtgaattcaagccccggtaaacggcggtggtaactataaccatcctaaggtagcgaaattccttgtcgggtaagttccgacctgcacgaatggcgtaacgacttccccactgtctcgaccaggagctcggcgaaattgcagtacgagtaaagatgctcgttaagcgcagaaggacgaaaagaccccgggacctttactataccttggtattggcattcggtgtggattgtgtagcataggcgggaggccgagaggcatggtcgccagatcgtgcggagccgcaaggtgaaataccgctctgttcgcattggatgtctaacctcgaacagtgatcctgttcagggacagtgcctggcgggtagtttaactggggcggttgcctcccaaagagtaacggaggcgcccaaaggtccgctcagcccggttggcaatcgggtggcgagtgcaagtgcacaagcgggcttgactgcgaggacgacggtccgagcagggacgaaagtcgggactagtgatccggtgccggtgtacggacgcggcatcgctcaacggataaaaggtaccccggggataacaggctgatcattcccaagagtccatatcgacgggatggtttggcacctcgatgtcggctcgtcgcatcctggggctggagcaggtcccaagggttcggctgttcgccgattaaagcggcacgcgagctgggttcagaacgtcgtgagacagtttggtctctatcctctgcgctcgttggaatgttgaggaggcctgcccatagtacgagaggacctgggtggacgaacctctggtatgccggttgtcacgccagtggcacggccggttggctacgttcggaagggataaccgctgaaagcatctaagcgggaagcctgctccaagataagcattccgtgcagcctcgggctgctgtagtccccatgcagaacacgtggtcgataggccggacgtggaagccccgcgaggggtggagccgaccggtactaacggacgaaaggcaacactattacaacgccgaagctgttttggcggatgagagaagattttcagcctgatacagattaaatcagaacgcagaagcggtctgataaaacagaattttttgcggcggtcatggcccaggtgagacgcccggtcccattccgaacccggaagctaaggcctggcacggcgatggtactgcacccgacagggtgtgggagagtagcacgccgcccaaataaaacgaaaggctcagtcgaaagactgggcctttcgttttatctgttgtttgtcggtgaacgctctcctgagtaggacaaatccgccgggagcggatttgaacgttgcgaagcaacggcccggagggtggcgggcaggacgcccgccataaactgccaggcatcaaattaagcagaaggccatcctgacggatggcctttttgcgtttctacaaactcttcctgtcgtcatatctacaagccggcgcgccgggaaatgtgcgcggaacccctatttgtttatttttctaaatacattcaaatatgtatccgctcatgagacaataaccctgataaatgcttcaataatattgaaaaaggaagagtatgagtattcaacatttccgtgtcgcccttattcccttttttgcggcattttgccttcctgtttttgctcacccagaaacgctggtgaaagtaaaagatgctgaagatcagttgggtgcacgagtgggttacatcgaactggatctcaacagcggtaagatccttgagagttttcgccccgaagaacgttttccaatgatgagcacttttaaagttctgctatgtggcgcggtattatcccgtgttgacgccgggcaagagcaactcggtcgccgcatacactattctcagaatgacttggttgagtactcaccagtcacagaaaagcatcttacggatggcatgacagtaagagaattatgcagtgctgcaataaccatgagtgataacactgcggccaacttacttctgacaacgatcggaggaccgaaggagctaaccgcttttttgcacaacatgggggatcatgtaactcgccttgatcgttgggaaccggagctgaatgaagccataccaaacgacgagcgtgacaccacgatgcctgcagcaatggcaacaacgttgcgcaaactattaactggcgaactacttactctagcttcccggcaacaattaatagactggatggaggcggataaagttgcaggaccacttctgcgctcggcccttccggctagctggtttattgctgataaatctggagccggtgagcgtgggtctcgcggtatcattgcagcactggggccagatggtaagccctcccgtatcgtagttatctacacgacggggagtcaggcaactatggatgaacgaaatagacagatcgctgagataggtgcctcactgattaagcattggtaactgcagaccaagtttactcatatatactttagattgatttaaaacttcatttttaatttaaaaggatctaggtgaagatcctttttgataatctcatgaccaaaatcccttaacgtgagttttcgttccactgagcgtcagaccccgtagaaaagatcaaaggatcttcttgagatcctttttttctgcgcgtaatctgctgcttgcaaacaaaaaaaccaccgctaccagcggtggtttgtttgccggatcaagagctaccaactctttttccgaaggtaactggcttcagcagagcgcagataccaaatactgtccttctagtgtagccgtagttaggccaccacttcaagaactctgtagcaccgcctacatacctcgctctgctaatcctgttaccagtggctgctgccagtggcgataagtcgtgtcttaccgggttggactcaagacgatagttaccggataaggcgcagcggtcgggctgaacggggggttcgtgcacacagcccagcttggagcgaacgacctacaccgaactgagatacctacagcgtgagctatgagaaagcgccacgcttcccgaagggagaaaggcggacaggtatccggtaagcggcagggtcggaacaggagagcgcacgagggagcttccagggggaaacgcctggtatctttatagtcctgtcgggtttcgccacctctgacttgagcgtcgatttttgtgatgctcgtcaggggggcggagcctatggaaaaacgccagcaacgcggcctttttacggttcctggccttttgctgg

SEQ ID NO: 114 - DNA, 7418 bp, Artificial
  Synthetic
agacttagggaccctgcggccgccattaattcctaatttttgttgacactctatcattgatagagttattttaccactccctatcagtgatagagaaaagtgaaatgaatagaccggccgctgagaaaaagcgaagcggcactgctctttaacaatttatcagacaatctgtgtgggcactcgaagatacggattcttaacgtcgcaagacgaaaaatgaataccaagtctcaagagtgaacacgtaattcattacgaagtttaattctttgagcgtcaaacttttaaattgaagagtttgatcatggctcagattgaacgctggcggcaggcctaacacatgcaagtcgaacggtaacaggaagaagcttgcttctttgctgacgagtggcggacgggtgagtaatgtctgggaaactgcctgatggagggggataactactggaaacggtagctaataccgcataacgtcgcaagaccaaagagggggaccttcgggcctcttgccatcggatgtgcccagatgggattagctagtaggtggggtaacggctcacctaggcgacgatccctagctggtctgagaggatgaccagccacactggaactgagacacggtccagactcctacgggaggcagcagtggggaatattgcacaatgggcgcaagcctgatgcagccatgccgcgtgtatgaagaaggccttcgggttgtaaagtactttcagcggggaggaagggagtaaagttaatacctttgctcattgacgttacccgcagaagaagcaccggctaactccgtgccagcagccgcggtaatacggagggtgcaagcgttaatcggaattactgggcgtaaagcgcacgcaggcggtttgttaagtcagatgtgaaatccccgggctcaacctgggaactgcatctgatactggcaagcttgagtctcgtagaggggggtagaattccaggtgtagcggtgaaatgcgtagagatctggaggaataccggtggcgaaggcggccccctggacgaagactgacgctcaggtgcgaaagcgtggggagcaaacaggattagataccctggtagtccacgccgtaaacgatgtcgacttggaggttgtgcccttgaggcgtggcttccggagctaacgcgttaagtcgaccgcctggggagtacggccgcaaggttaaaactcaaatgaattgacgggggcccgcacaagcggtggagcatgtggtttaattcgatgcaacgcgaagaaccttacctggtcttgacatccacggaagttttcagagatgagaatgtgccttcgggaaccgtgagacaggtgctgcatggctgtcgtcagctcgtgttgtgaaatgttgggttaagtcccgcaacgagcgcaacccttatcctttgttgccagcggtccggccgggaactcaaaggagactgccagtgataaactggaggaaggtggggatgacgtcaagtcatcatggcccttacgaccagggctacacacgtgctacaatggcgcatacaaagagaagcgacctcgcgagagcaagcggacctcataaagtgcgtcgtagtccggattggagtctgcaactcgactccatgaagtcggaatcgctagtaatcgtggatcagaatgccacggtgaatacgttcccgggccttgtacacaccgcccgtcacaccatgggagtgggttgcaaaagaagtaggtagcttaaccttcgggagggcgcttaccactttgtgattcatgactggggtgaagtcgtaacaaggtaaccgtaggggaacctgcggttggatcacctccttaccttaaagaagcgtactttgtagtgctcacacagattgtctgatagaaagtgaaaagcaaggcgtttacgcgttgggagtgaggctgaagagaataaggccgttcgctttctattaatgaaagctcaccctacacgaaaatatcacgcaacgcgtgataagcaattttcgtgtccccttcgtctagaggcccaggacaccgccctttcacggcggtaacaggggttcgaatcccctaggggacgccacttgctggtttgtgagtgaaagtcgccgaccttaatatctcaaaactcatcttcgggtgatgtttgagatatttgctctttaaaaatctggatcaagctgaaaattgaaacactgaacaacgagagttgttcgtgagtctctcaaattttcgcaacacgatgatgaatcgaaagaaacatcttcgggttgtgaggttaagcgactaagcgtacacggtggatgccctggcagtcagaggcgatgaaggacgtgctaatctgcgataagcgtcggtaaggtgatatgaaccgttataaccggcgatttccgaatggggaaacccagtgtgtttcgacacactatcattaactgaatccataggttaatgaggcgaaccgggggaactgaaacatctaagtaccccgaggaaaagaaatcaaccgagattcccccagtagcggcgagcgaacggggagcagcccagagcctgaatcagtgtgtgtgttagtggaagcgtctggaaaggcgcgcgatacagggtgacagccccgtacacaaaaatgcacatgctgtgagctcgatgagtagggcgggacacgtggtatcctgtctgaatatggggggaccatcctccaaggctaaatactcctgactgaccgatagtgaaccagtaccgtgagggaaaggcgaaaagaaccccggcgaggggagtgaaaaagaacctgaaaccgtgtacgtacaagcagtgggagcacgcttaggcgtgtgactgcgtaccttttgtataatgggtcagcgacttatattctgtagcaaggttaaccgaataggggagccgaagggaaaccgagtcttaactgggcgttaagttgcagggtatagacccgaaacccggtgatctagccatgggcaggttgaaggttgggtaacactaactggaggaccgaaccgactaatgttgaaaaattagcggatgacttgtggctgggggtgaaaggccaatcaaaccgggagatagctggttctccccgaaagctatttaggtagcgcctcgtgaattcatctccgggggtagagcactgtttcggcaagggggtcatcccgacttaccaacccgatgcaaactgcgaataccggagaatgttatcacgggagacacacggcgggtgctaacgtccgtcgtgaagagggaaacaacccagaccgccagctaaggtcccaaagtcatggttaagtgggaaacgatgtgggaaggcccagacagccaggatgttggcttagaagcagccatcatttaaagaaagcgtaatagctcactggtcgagtcggcctgcgcggaagatgtaacggggctaaaccatgcaccgaagctgcggcagcgacgcttatgcgttgttgggtaggggagcgttctgtaagcctgcgaaggtgtgctgtgaggcatgctggaggtatcagaagtgcgaatgctgacataagtaacgataaagcgggtgaaaagcccgctcgccggaagaccaagggttcctgtccaacgttaatcggggcagggtgagtcgacccctaaggcgaggccgaaaggcgtagtcgatgggaaacaggttaatattcctgtacttggtgttactgcgaaggggggacggagaaggctatgttggccgggcgacggttgtcccggtttaagcgtgtaggctggttttccaggcaaatccggaaaatcaaggctgaggcgtgatgacgaggcactacggtgctgaagcaacaaatgccctgcttccaggaaaagcctctaagcatcaggtaacatcaaatcgtaccccaaaccgacacaggtggtcaggtagagaataccaaggcgcttgagagaactcgggtgaaggaactaggcaaaatggtgccgtaacttcgggagaaggcacgctgatatgtaggtgaggtccctcgcggatggagctgaaatcagtcgaagataccagctggctgcaactgtttattaaaaacacagcactgtgcaaacacgaaagtggacgtatacggtgtgacgcctgcccggtgccggaaggttaattgatggggttagcgcaagcgaagctcttgatcgaagccccggtaaacggcggccgtaactataacggtcctaaggtagcgaaattccttgtcgggtaagttccgacctgcacgaatggcgtaatgatggccaggctgtctccacccgagactcagtgaaattgaactcgctgtgaagatgcagtgtacccgcggcaagacggaaagaccccgtgaacctttactatagcttgacactgaacattgagccttgatgtgtaggataggtgggaggctttgaagtgtggacgccagtctgcatggagccgaccttgaaataccaccctttaatgtttgatgttctaacgttgacccgtaatccgggttgcggacagtgtctggtgggtagtttgactggggcggtctcctcctaaagagtaacggaggagcacgaaggttggctaatcctggtcggacatcaggaggttagtgcaatggcataagccagcttgactgcgagcgtgacggcgcgagcaggtgcgaaagcaggtcatagtgatccggtggttctgaatggaagggccatcgctcaacggataaaaggtactccggggataacaggctgataccgcccaagagttcatatcgacggcggtgtttggcacctcgatgtcggctcatcacatcctggggctgaagtaggtcccaagggtatggctgttcgccatttaaagtggtacgcgagctgggtttagaacgtcgtgagacagttcggtccctatctgccgtgggcgctggagaactgaggggggctgctcctagtacgagaggaccggagtggacgcatcactggtgttcgggttgtcatgccaatggcactgcccggtagctaaatgcggaagagataagtgctgaaagcatctaagcacgaaacttgccccgagatgagttctccctgaccctttaagggtcctgaaggaacgttgaagacgacgacgttgataggccgggtgtgtaagcgcagcgatgcgttgagctaaccggtactaatgaaccgtgaggcttaaccttacaacgccgaagctgttttggcggatgagagaagattttcagcctgatacagattaaatcagaacgcagaagcggtctgataaaacagaatttgcctggcggcagtagcgcggtggtcccacctgaccccatgccgaactcagaagtgaaacgccgtagcgccgatggtagtgtggggtctccccatgcgagagtagggaactgccaggcatcaaataaaacgaaaggctcagtcgaaagactgggcctttcgttttatctgttgtttgtcggtgaacgctctcctgagtaggacaaatccgccgggagcggatttgaacgttgcgaagcaacggcccggagggtggcgggcaggacgcccgccataaactgccaggcatcaaattaagcagaaggccatcctgacggatggcctttttgcgtttctacaaactcttcctgtcgtcatatctacaagccggcgcgccgggaaatgtgcgcggaacccctatttgtttatttttctaaatacattcaaatatgtatccgctcatgagacaataaccctgataaatgcttcaataatattgaaaaaggaagagtatgagtattcaacatttccgtgtcgcccttattcccttttttgcggcattttgccttcctgtttttgctcacccagaaacgctggtgaaagtaaaagatgctgaagatcagttgggtgcacgagtgggttacatcgaactggatctcaacagcggtaagatccttgagagttttcgccccgaagaacgttttccaatgatgagcacttttaaagttctgctatgtggcgcggtattatcccgtgttgacgccgggcaagagcaactcggtcgccgcatacactattctcagaatgacttggttgagtactcaccagtcacagaaaagcatcttacggatggcatgacagtaagagaattatgcagtgctgcaataaccatgagtgataacactgcggccaacttacttctgacaacgatcggaggaccgaaggagctaaccgcttttttgcacaacatgggggatcatgtaactcgccttgatcgttgggaaccggagctgaatgaagccataccaaacgacgagcgtgacaccacgatgcctgcagcaatggcaacaacgttgcgcaaactattaactggcgaactacttactctagcttcccggcaacaattaatagactggatggaggcggataaagttgcaggaccacttctgcgctcggcccttccggctagctggtttattgctgataaatctggagccggtgagcgtgggtctcgcggtatcattgcagcactggggccagatggtaagccctcccgtatcgtagttatctacacgacggggagtcaggcaactatggatgaacgaaatagacagatcgctgagataggtgcctcactgattaagcattggtaactgcagaccaagtttactcatatatactttagattgatttaaaacttcatttttaatttaaaaggatctaggtgaagatcctttttgataatctcatgaccaaaatcccttaacgtgagttttcgttccactgagcgtcagaccccgtagaaaagatcaaaggatcttcttgagatcctttttttctgcgcgtaatctgctgcttgcaaacaaaaaaaccaccgctaccagcggtggtttgtttgccggatcaagagctaccaactctttttccgaaggtaactggcttcagcagagcgcagataccaaatactgtccttctagtgtagccgtagttaggccaccacttcaagaactctgtagcaccgcctacatacctcgctctgctaatcctgttaccagtggctgctgccagtggcgataagtcgtgtcttaccgggttggactcaagacgatagttaccggataaggcgcagcggtcgggctgaacggggggttcgtgcacacagcccagcttggagcgaacgacctacaccgaactgagatacctacagcgtgagctatgagaaagcgccacgcttcccgaagggagaaaggcggacaggtatccggtaagcggcagggtcggaacaggagagcgcacgagggagcttccagggggaaacgcctggtatctttatagtcctgtcgggtttcgccacctctgacttgagcgtcgatttttgtgatgctcgtcaggggggcggagcctatggaaaaacgccagcaacgcggcctttttacggttcctggccttttgctgg

SEQ ID NO: 115 - DNA, 7452 bp, Artificial
  Synthetic
gcggccgcgatctctcacctaccaaacaatgcccccctgcaaaaaataaattcatataaaaaacatacagataaccatctgcggtgatccctatcagtgatagagattgacatccctatcagtgatagagatactgagcacgggtaccggccgctgagaaaaagcgaagcggcactgctctttaacaatttatcagacaatctgtgtgggcactcgaagatacggattcttaacgtcgcaagacgaaaaatgaataccaagtctcaagagtgaacacgtaattcattacgaagtttaattctttgagcgtcaaacttttaaattgaagagtttgatcatggctcagattgaacgctggcggcaggcctaacacatgcaagtcgaacggtaacaggaagaagcttgcttctttgctgacgagtggcggacgggtgagtaatgtctgggaaactgcctgatggagggggataactactggaaacggtagctaataccgcataacgtcgcaagaccaaagagggggaccttcgggcctcttgccatcggatgtgcccagatgggattagctagtaggtggggtaacggctcacctaggcgacgatccctagctggtctgagaggatgaccagccacactggaactgagacacggtccagactcctacgggaggcagcagtggggaatattgcacaatgggcgcaagcctgatgcagccatgccgcgtgtatgaagaaggccttcgggttgtaaagtactttcagcggggaggaagggagtaaagttaatacctttgctcattgacgttacccgcagaagaagcaccggctaactccgtgccagcagccgcggtaatacggagggtgcaagcgttaatcggaattactgggcgtaaagcgcacgcaggcggtttgttaagtcagatgtgaaatccccgggctcaacctgggaactgcatctgatactggcaagcttgagtctcgtagaggggggtagaattccaggtgtagcggtgaaatgcgtagagatctggaggaataccggtggcgaaggcggccccctggacgaagactgacgctcaggtgcgaaagcgtggggagcaaacaggattagataccctggtagtccacgccgtaaacgatgtcgacttggaggttgtgcccttgaggcgtggcttccggagctaacgcgttaagtcgaccgcctggggagtacggccgcaaggttaaaactcaaatgaattgacgggggcccgcacaagcggtggagcatgtggtttaattcgatgcaacgcgaagaaccttacctggtcttgacatccacggaagttttcagagatgagaatgtgccttcgggaaccgtgagacaggtgctgcatggctgtcgtcagctcgtgttgtgaaatgttgggttaagtcccgcaacgagcgcaacccttatcctttgttgccagcggtccggccgggaactcaaaggagactgccagtgataaactggaggaaggtggggatgacgtcaagtcatcatggcccttacgaccagggctacacacgtgctacaatggcgcatacaaagagaagcgacctcgcgagagcaagcggacctcataaagtgcgtcgtagtccggattggagtctgcaactcgactccatgaagtcggaatcgctagtaatcgtggatcagaatgccacggtgaatacgttcccgggccttgtacacaccgcccgtcacaccacgagagtttgtaacacccgaagtcggtgaggtaacctttttggagccagccgcctaaggtgggatagatgattggggtgaagtcgtaacaaggtaaccgtaggggaacctgcggttggatcatgtggttaccttaaagaagcgtactttgtagtgctcacacagattgtctgatagaaagtgaaaagcaaggcgtttacgcgttgggagtgaggctgaagagaataaggccgttcgctttctattaatgaaagctcaccctacacgaaaatatcacgcaacgcgtgataagcaattttcgtgtccccttcgtctagaggcccaggacaccgccctttcacggcggtaacaggggttcgaatcccctaggggacgccacttgctggtttgtgagtgaaagtcgccgaccttaatatctcaaaactcatcttcgggtgatgtttgagatatttgctctttaaaaatctggatcaagctgaaaattgaaacactgaacaacgagagttgttcgtgagtctctcaaattttcgcaacacgatgatgaatcgaaagaaacatcttcgggttgtgaggttaagcgactaagcgtacacggtggatgccctggcagtcagaggcgatgaaggacgtgctaatctgcgataagcgtcggtaaggtgatatgaaccgttataaccggcgatttccgaatggggaaacccagtgtgtttcgacacactatcattaactgaatccataggttaatgaggcgaaccgggggaactgaaacatctaagtaccccgaggaaaagaaatcaaccgagattcccccagtagcggcgagcgaacggggagcagcccagagcctgaatcagtgtgtgtgttagtggaagcgtctggaaaggcgcgcgatacagggtgacagccccgtacacaaaaatgcacatgctgtgagctcgatgagtagggcgggacacgtggtatcctgtctgaatatggggggaccatcctccaaggctaaatactcctgactgaccgatagtgaaccagtaccgtgagggaaaggcgaaaagaaccccggcgaggggagtgaaaaagaacctgaaaccgtgtacgtacaagcagtgggagcacgcttaggcgtgtgactgcgtaccttttgtataatgggtcagcgacttatattctgtagcaaggttaaccgaataggggagccgaagggaaaccgagtcttaactgggcgttaagttgcagggtatagacccgaaacccggtgatctagccatgggcaggttgaaggttgggtaacactaactggaggaccgaaccgactaatgttgaaaaattagcggatgacttgtggctgggggtgaaaggccaatcaaaccgggagatagctggttctccccgaaagctatttaggtagcgcctcgtgaattcatctccgggggtagagcactgtttcggcaagggggtcatcccgacttaccaacccgatgcaaactgcgaataccggagaatgttatcacgggagacacacggcgggtgctaacgtccgtcgtgaagagggaaacaacccagaccgccagctaaggtcccaaagtcatggttaagtgggaaacgatgtgggaaggcccagacagccaggatgttggcttagaagcagccatcatttaaagaaagcgtaatagctcactggtcgagtcggcctgcgcggaagatgtaacggggctaaaccatgcaccgaagctgcggcagcgacgcttatgcgttgttgggtaggggagcgttctgtaagcctgcgaaggtgtgctgtgaggcatgctggaggtatcagaagtgcgaatgctgacataagtaacgataaagcgggtgaaaagcccgctcgccggaagaccaagggttcctgtccaacgttaatcggggcagggtgagtcgacccctaaggcgaggccgaaaggcgtagtcgatgggaaacaggttaatattcctgtacttggtgttactgcgaaggggggacggagaaggctatgttggccgggcgacggttgtcccggtttaagcgtgtaggctggttttccaggcaaatccggaaaatcaaggctgaggcgtgatgacgaggcactacggtgctgaagcaacaaatgccctgcttccaggaaaagcctctaagcatcaggtaacatcaaatcgtaccccaaaccgacacaggtggtcaggtagagaataccaaggcgcttgagagaactcgggtgaaggaactaggcaaaatggtgccgtaacttcgggagaaggcacgctgatatgtaggtgaggtccctcgcggatggagctgaaatcagtcgaagataccagctggctgcaactgtttattaaaaacacagcactgtgcaaacacgaaagtggacgtatacggtgtgacgcctgcccggtgccggaaggttaattgatggggttagcgcaagcgaagctcttgatcgaagccccggtaaacggcggccgtaactataacggtcctaaggtagcgaaattccttgtcgggtaagttccgacctgcacgaatggcgtaatgatggccaggctgtctccacccgagactcagtgaaattgaactcgctgtgaagatgcagtgtacccgcggcaagacggaaagaccccgtgaacctttactatagcttgacactgaacattgagccttgatgtgtaggataggtgggaggctttgaagtgtggacgccagtctgcatggagccgaccttgaaataccaccctttaatgtttgatgttctaacgttgacccgtaatccgggttgcggacagtgtctggtgggtagtttgactggggcggtctcctcctaaagagtaacggaggagcacgaaggttggctaatcctggtcggacatcaggaggttagtgcaatggcataagccagcttgactgcgagcgtgacggcgcgagcaggtgcgaaagcaggtcatagtgatccggtggttctgaatggaagggccatcgctcaacggataaaaggtactccggggataacaggctgataccgcccaagagttcatatcgacggcggtgtttggcacctcgatgtcggctcatcacatcctggggctgaagtaggtcccaagggtatggctgttcgccatttaaagtggtacgcgagctgggtttagaacgtcgtgagacagttcggtccctatctgccgtgggcgctggagaactgaggggggctgctcctagtacgagaggaccggagtggacgcatcactggtgttcgggttgtcatgccaatggcactgcccggtagctaaatgcggaagagataagtgctgaaagcatctaagcacgaaacttgccccgagatgagttctccctgaccctttaagggtcctgaaggaacgttgaagacgacgacgttgataggccgggtgtgtaagcgcagcgatgcgttgagctaaccggtactaatgaaccgtgaggcttaaccttacaacgccgaagctgttttggcggatgagagaagattttcagcctgatacagattaaatcagaacgcagaagcggtctgataaaacagaatttgcctggcggcagtagcgcggtggtcccacctgaccccatgccgaactcagaagtgaaacgccgtagcgccgatggtagtgtggggtctccccatgcgagagtagggaactgccaggcatcaaataaaacgaaaggctcagtcgaaagactgggcctttcgttttatctgttgtttgtcggtgaacgctctcctgagtaggacaaatccgccgggagcggatttgaacgttgcgaagcaacggcccggagggtggcgggcaggacgcccgccataaactgccaggcatcaaattaagcagaaggccatcctgacggatggcctttttgcgtttctacaaactcttcctgtcgtcatatctacaagccggcgcgccgggaaatgtgcgcggaacccctatttgtttatttttctaaatacattcaaatatgtatccgctcatgagacaataaccctgataaatgcttcaataatattgaaaaaggaagagtatgagtattcaacatttccgtgtcgcccttattcccttttttgcggcattttgccttcctgtttttgctcacccagaaacgctggtgaaagtaaaagatgctgaagatcagttgggtgcacgagtgggttacatcgaactggatctcaacagcggtaagatccttgagagttttcgccccgaagaacgttttccaatgatgagcacttttaaagttctgctatgtggcgcggtattatcccgtgttgacgccgggcaagagcaactcggtcgccgcatacactattctcagaatgacttggttgagtactcaccagtcacagaaaagcatcttacggatggcatgacagtaagagaattatgcagtgctgcaataaccatgagtgataacactgcggccaacttacttctgacaacgatcggaggaccgaaggagctaaccgcttttttgcacaacatgggggatcatgtaactcgccttgatcgttgggaaccggagctgaatgaagccataccaaacgacgagcgtgacaccacgatgcctgcagcaatggcaacaacgttgcgcaaactattaactggcgaactacttactctagcttcccggcaacaattaatagactggatggaggcggataaagttgcaggaccacttctgcgctcggcccttccggctagctggtttattgctgataaatctggagccggtgagcgtgggtctcgcggtatcattgcagcactggggccagatggtaagccctcccgtatcgtagttatctacacgacggggagtcaggcaactatggatgaacgaaatagacagatcgctgagataggtgcctcactgattaagcattggtaactgcagaccaagtttactcatatatactttagattgatttaaaacttcatttttaatttaaaaggatctaggtgaagatcctttttgataatctcatgaccaaaatcccttaacgtgagttttcgttccactgagcgtcagaccccgtagaaaagatcaaaggatcttcttgagatcctttttttctgcgcgtaatctgctgcttgcaaacaaaaaaaccaccgctaccagcggtggtttgtttgccggatcaagagctaccaactctttttccgaaggtaactggcttcagcagagcgcagataccaaatactgtccttctagtgtagccgtagttaggccaccacttcaagaactctgtagcaccgcctacatacctcgctctgctaatcctgttaccagtggctgctgccagtggcgataagtcgtgtcttaccgggttggactcaagacgatagttaccggataaggcgcagcggtcgggctgaacggggggttcgtgcacacagcccagcttggagcgaacgacctacaccgaactgagatacctacagcgtgagctatgagaaagcgccacgcttcccgaagggagaaaggcggacaggtatccggtaagcggcagggtcggaacaggagagcgcacgagggagcttccagggggaaacgcctggtatctttatagtcctgtcgggtttcgccacctctgacttgagcgtcgatttttgtgatgctcgtcaggggggcggagcctatggaaaaacgccagcaacgcggcctttttacggttcctggccttttgctgg

SEQ ID NO: 116 - DNA, 7446 bp, Artificial
  Synthetic
gcggccgcgatctctcacctaccaaacaatgcccccctgcaaaaaataaattcatataaaaaacatacagataaccatctgcggtgatccctatcagtgatagagattgacatccctatcagtgatagagatactgagcacgggtaccggccgctgagaaaaagcgaagcggcactgctctttaacaatttatcagacaatctgtgtgggcactcgaagatacggattcttaacgtcgcaagacgaaaaatgaataccaagtctcaagagtgaacacgtaattcattacgaagtttaattctttgagcgtcaaacttttaaattgaagagtttgatcatggctcagattgaacgctggcggcaggcctaacacatgcaagtcgaacggtaacaggaagaagcttgcttctttgctgacgagtggcggacgggtgagtaatgtctgggaaactgcctgatggagggggataactactggaaacggtagctaataccgcataacgtcgcaagaccaaagagggggaccttcgggcctcttgccatcggatgtgcccagatgggattagctagtaggtggggtaacggctcacctaggcgacgatccctagctggtctgagaggatgaccagccacactggaactgagacacggtccagactcctacgggaggcagcagtggggaatattgcacaatgggcgcaagcctgatgcagccatgccgcgtgtatgaagaaggccttcgggttgtaaagtactttcagcggggaggaagggagtaaagttaatacctttgctcattgacgttacccgcagaagaagcaccggctaactccgtgccagcagccgcggtaatacggagggtgcaagcgttaatcggaattactgggcgtaaagcgcacgcaggcggtttgttaagtcagatgtgaaatccccgggctcaacctgggaactgcatctgatactggcaagcttgagtctcgtagaggggggtagaattccaggtgtagcggtgaaatgcgtagagatctggaggaataccggtggcgaaggcggccccctggacgaagactgacgctcaggtgcgaaagcgtggggagcaaacaggattagataccctggtagtccacgccgtaaacgatgtcgacttggagggtttccgcccttcagtgctggagctaacgcgttaagtcgaccgcctggggagtacggccgcaaggttaaaactcaaatgaattgacgggggcccgcacaagcggtggagcatgtggtttaattcgatgcaacgcgaagaaccttacctggtcttgacatccacggaagttttcagagatgagaatgtgccttcgggaaccgtgagacaggtgctgcatggctgtcgtcagctcgtgttgtgaaatgttgggttaagtcccgcaacgagcgcaacccttatcctttgttgccagcggtccggccgggaactcaaaggagactgccagtgataaactggaggaaggtggggatgacgtcaagtcatcatggcccttacgaccagggctacacacgtgctacaatggcgcatacaaagagaagcgacctcgcgagagcaagcggacctcataaagtgcgtcgtagtccggattggagtctgcaactcgactccatgaagtcggaatcgctagtaatcgtggatcagaatgccacggtgaatacgttcccgggccttgtacacaccgcccgtcacaccatgggagtgggttgcaaaagaagtaggtagcttaaccttcgggagggcgcttaccactttgtgattcatgactggggtgaagtcgtaacaaggtaaccgtaggggaacctgcggttggatcatgtggttaccttaaagaagcgtactttgtagtgctcacacagattgtctgatagaaagtgaaaagcaaggcgtttacgcgttgggagtgaggctgaagagaataaggccgttcgctttctattaatgaaagctcaccctacacgaaaatatcacgcaacgcgtgataagcaattttcgtgtccccttcgtctagaggcccaggacaccgccctttcacggcggtaacaggggttcgaatcccctaggggacgccacttgctggtttgtgagtgaaagtcgccgaccttaatatctcaaaactcatcttcgggtgatgtttgagatatttgctctttaaaaatctggatcaagctgaaaattgaaacactgaacaacgagagttgttcgtgagtctctcaaattttcgcaacacgatgatgaatcgaaagaaacatcttcgggttgtgaggttaagcgactaagcgtacacggtggatgccctggcagtcagaggcgatgaaggacgtgctaatctgcgataagcgtcggtaaggtgatatgaaccgttataaccggcgatttccgaatggggaaacccagtgtgtttcgacacactatcattaactgaatccataggttaatgaggcgaaccgggggaactgaaacatctaagtaccccgaggaaaagaaatcaaccgagattcccccagtagcggcgagcgaacggggagcagcccagagcctgaatcagtgtgtgtgttagtggaagcgtctggaaaggcgcgcgatacagggtgacagccccgtacacaaaaatgcacatgctgtgagctcgatgagtagggcgggacacgtggtatcctgtctgaatatggggggaccatcctccaaggctaaatactcctgactgaccgatagtgaaccagtaccgtgagggaaaggcgaaaagaaccccggcgaggggagtgaaaaagaacctgaaaccgtgtacgtacaagcagtgggagcacgcttaggcgtgtgactgcgtaccttttgtataatgggtcagcgacttatattctgtagcaaggttaaccgaataggggagccgaagggaaaccgagtcttaactgggcgttaagttgcagggtatagacccgaaacccggtgatctagccatgggcaggttgaaggttgggtaacactaactggaggaccgaaccgactaatgttgaaaaattagcggatgacttgtggctgggggtgaaaggccaatcaaaccgggagatagctggttctccccgaaagctatttaggtagcgcctcgtgaattcatctccgggggtagagcactgtttcggcaagggggtcatcccgacttaccaacccgatgcaaactgcgaataccggagaatgttatcacgggagacacacggcgggtgctaacgtccgtcgtgaagagggaaacaacccagaccgccagctaaggtcccaaagtcatggttaagtgggaaacgatgtgggaaggcccagacagccaggatgttggcttagaagcagccatcatttaaagaaagcgtaatagctcactggtcgagtcggcctgcgcggaagatgtaacggggctaaaccatgcaccgaagctgcggcagcgacgcttatgcgttgttgggtaggggagcgttctgtaagcctgcgaaggtgtgctgtgaggcatgctggaggtatcagaagtgcgaatgctgacataagtaacgataaagcgggtgaaaagcccgctcgccggaagaccaagggttcctgtccaacgttaatcggggcagggtgagtcgacccctaaggcgaggccgaaaggcgtagtcgatgggaaacaggttaatattcctgtacttggtgttactgcgaaggggggacggagaaggctatgttggccgggcgacggttgtcccggtttaagcgtgtaggctggttttccaggcaaatccggaaaatcaaggctgaggcgtgatgacgaggcactacggtgctgaagcaacaaatgccctgcttccaggaaaagcctctaagcatcaggtaacatcaaatcgtaccccaaaccgacacaggtggtcaggtagagaataccaaggcgcttgagagaactcgggtgaaggaactaggcaaaatggtgccgtaacttcgggagaaggcacgctgatatgtaggtgaggtccctcgcggatggagctgaaatcagtcgaagataccagctggctgcaactgtttattaaaaacacagcactgtgcaaacacgaaagtggacgtatacggtgtgacgcctgcccggtgccggaaggttaattgatggggttagcgcaagcgaagctcttgatcgaagccccggtaaacggcggccgtaactataacggtcctaaggtagcgaaattccttgtcgggtaagttccgacctgcacgaatggcgtaatgatggccaggctgtctccacccgagactcagtgaaattgaactcgctgtgaagatgcagtgtacccgcggcaagacggaaagaccccgtgaacctttactatagcttgacactgaacattgagccttgatgtgtaggataggtgggaggctttgaagtgtggacgccagtctgcatggagccgaccttgaaataccaccctttaatgtttgatgttctaacgttgacccgtaatccgggttgcggacagtgtctggtgggtagtttgactggggcggtctcctcctaaagagtaacggaggagcacgaaggttggctaatcctggtcggacatcaggaggttagtgcaatggcataagccagcttgactgcgagcgtgacggcgcgagcaggtgcgaaagcaggtcatagtgatccggtggttctgaatggaagggccatcgctcaacggataaaaggtactccggggataacaggctgataccgcccaagagttcatatcgacggcggtgtttggcacctcgatgtcggctcatcacatcctggggctgaagtaggtcccaagggtatggctgttcgccatttaaagtggtacgcgagctgggtttagaacgtcgtgagacagttcggtccctatctgccgtgggcgctggagaactgaggggggctgctcctagtacgagaggaccggagtggacgcatcactggtgttcgggttgtcatgccaatggcactgcccggtagctaaatgcggaagagataagtgctgaaagcatctaagcacgaaacttgccccgagatgagttctccctgaccctttaagggtcctgaaggaacgttgaagacgacgacgttgataggccgggtgtgtaagcgcagcgatgcgttgagctaaccggtactaatgaaccgtgaggcttaaccttacaacgccgaagctgttttggcggatgagagaagattttcagcctgatacagattaaatcagaacgcagaagcggtctgataaaacagaatttgcctggcggcagtagcgcggtggtcccacctgaccccatgccgaactcagaagtgaaacgccgtagcgccgatggtagtgtggggtctccccatgcgagagtagggaactgccaggcatcaaataaaacgaaaggctcagtcgaaagactgggcctttcgttttatctgttgtttgtcggtgaacgctctcctgagtaggacaaatccgccgggagcggatttgaacgttgcgaagcaacggcccggagggtggcgggcaggacgcccgccataaactgccaggcatcaaattaagcagaaggccatcctgacggatggcctttttgcgtttctacaaactcttcctgtcgtcatatctacaagccggcgcgccgggaaatgtgcgcggaacccctatttgtttatttttctaaatacattcaaatatgtatccgctcatgagacaataaccctgataaatgcttcaataatattgaaaaaggaagagtatgagtattcaacatttccgtgtcgcccttattcccttttttgcggcattttgccttcctgtttttgctcacccagaaacgctggtgaaagtaaaagatgctgaagatcagttgggtgcacgagtgggttacatcgaactggatctcaacagcggtaagatccttgagagttttcgccccgaagaacgttttccaatgatgagcacttttaaagttctgctatgtggcgcggtattatcccgtgttgacgccgggcaagagcaactcggtcgccgcatacactattctcagaatgacttggttgagtactcaccagtcacagaaaagcatcttacggatggcatgacagtaagagaattatgcagtgctgcaataaccatgagtgataacactgcggccaacttacttctgacaacgatcggaggaccgaaggagctaaccgcttttttgcacaacatgggggatcatgtaactcgccttgatcgttgggaaccggagctgaatgaagccataccaaacgacgagcgtgacaccacgatgcctgcagcaatggcaacaacgttgcgcaaactattaactggcgaactacttactctagcttcccggcaacaattaatagactggatggaggcggataaagttgcaggaccacttctgcgctcggcccttccggctagctggtttattgctgataaatctggagccggtgagcgtgggtctcgcggtatcattgcagcactggggccagatggtaagccctcccgtatcgtagttatctacacgacggggagtcaggcaactatggatgaacgaaatagacagatcgctgagataggtgcctcactgattaagcattggtaactgcagaccaagtttactcatatatactttagattgatttaaaacttcatttttaatttaaaaggatctaggtgaagatcctttttgataatctcatgaccaaaatcccttaacgtgagttttcgttccactgagcgtcagaccccgtagaaaagatcaaaggatcttcttgagatcctttttttctgcgcgtaatctgctgcttgcaaacaaaaaaaccaccgctaccagcggtggtttgtttgccggatcaagagctaccaactctttttccgaaggtaactggcttcagcagagcgcagataccaaatactgtccttctagtgtagccgtagttaggccaccacttcaagaactctgtagcaccgcctacatacctcgctctgctaatcctgttaccagtggctgctgccagtggcgataagtcgtgtcttaccgggttggactcaagacgatagttaccggataaggcgcagcggtcgggctgaacggggggttcgtgcacacagcccagcttggagcgaacgacctacaccgaactgagatacctacagcgtgagctatgagaaagcgccacgcttcccgaagggagaaaggcggacaggtatccggtaagcggcagggtcggaacaggagagcgcacgagggagcttccagggggaaacgcctggtatctttatagtcctgtcgggtttcgccacctctgacttgagcgtcgatttttgtgatgctcgtcaggggggcggagcctatggaaaaacgccagcaacgcggcctttttacggttcctggccttttgctgg

SEQ ID NO: 117 - DNA, 7451 bp, Artificial
  Synthetic
gcggccgcgatctctcacctaccaaacaatgcccccctgcaaaaaataaattcatataaaaaacatacagataaccatctgcggtgatccctatcagtgatagagattgacatccctatcagtgatagagatactgagcacgggtaccggccgctgagaaaaagcgaagcggcactgctctttaacaatttatcagacaatctgtgtgggcactcgaagatacggattcttaacgtcgcaagacgaaaaatgaataccaagtctcaagagtgaacacgtaattcattacgaagtttaattctttgagcgtcaaacttttaaattgaagagtttgatcatggctcagattgaacgctggcggcaggcctaacacatgcaagtcgaacggtaacaggaagaagcttgcttctttgctgacgagtggcggacgggtgagtaatgtctgggaaactgcctgatggagggggataactactggaaacggtagctaataccgcataacgtcgcaagaccaaagagggggaccttcgggcctcttgccatcggatgtgcccagatgggattagctagtaggtggggtaacggctcacctaggcgacgatccctagctggtctgagaggatgaccagccacactggaactgagacacggtccagactcctacgggaggcagcagtggggaatattgcacaatgggcgcaagcctgatgcagccatgccgcgtgtatgaagaaggccttcgggttgtaaagtactttcagcggggaagaacaaggacgttagtaactgaacgtcccctgacggtacccgcagaagaagcaccggctaactccgtgccagcagccgcggtaatacggagggtgcaagcgttaatcggaattactgggcgtaaagcgcacgcaggcggtttgttaagtcagatgtgaaatccccgggctcaacctgggaactgcatctgatactggcaagcttgagtctcgtagaggggggtagaattccaggtgtagcggtgaaatgcgtagagatctggaggaataccggtggcgaaggcggccccctggacgaagactgacgctcaggtgcgaaagcgtggggagcaaacaggattagataccctggtagtccacgccgtaaacgatgtcgacttggaggttgtgcccttgaggcgtggcttccggagctaacgcgttaagtcgaccgcctggggagtacggccgcaaggttaaaactcaaatgaattgacgggggcccgcacaagcggtggagcatgtggtttaattcgatgcaacgcgaagaaccttacctggtcttgacatccacggaagttttcagagatgagaatgtgccttcgggaaccgtgagacaggtgctgcatggctgtcgtcagctcgtgttgtgaaatgttgggttaagtcccgcaacgagcgcaacccttatcctttgttgccagcggtccggccgggaactcaaaggagactgccagtgataaactggaggaaggtggggatgacgtcaagtcatcatggcccttacgaccagggctacacacgtgctacaatggcgcatacaaagagaagcgacctcgcgagagcaagcggacctcataaagtgcgtcgtagtccggattggagtctgcaactcgactccatgaagtcggaatcgctagtaatcgtggatcagaatgccacggtgaatacgttcccgggccttgtacacaccgcccgtcacaccatgggagtgggttgcaaaagaagtaggtagcttaaccttcgggagggcgcttaccactttgtgattcatgactggggtgaagtcgtaacaaggtaaccgtaggggaacctgcggttggatcatgtggttaccttaaagaagcgtactttgtagtgctcacacagattgtctgatagaaagtgaaaagcaaggcgtttacgcgttgggagtgaggctgaagagaataaggccgttcgctttctattaatgaaagctcaccctacacgaaaatatcacgcaacgcgtgataagcaattttcgtgtccccttcgtctagaggcccaggacaccgccctttcacggcggtaacaggggttcgaatcccctaggggacgccacttgctggtttgtgagtgaaagtcgccgaccttaatatctcaaaactcatcttcgggtgatgtttgagatatttgctctttaaaaatctggatcaagctgaaaattgaaacactgaacaacgagagttgttcgtgagtctctcaaattttcgcaacacgatgatgaatcgaaagaaacatcttcgggttgtgaggttaagcgactaagcgtacacggtggatgccctggcagtcagaggcgatgaaggacgtgctaatctgcgataagcgtcggtaaggtgatatgaaccgttataaccggcgatttccgaatggggaaacccagtgtgtttcgacacactatcattaactgaatccataggttaatgaggcgaaccgggggaactgaaacatctaagtaccccgaggaaaagaaatcaaccgagattcccccagtagcggcgagcgaacggggagcagcccagagcctgaatcagtgtgtgtgttagtggaagcgtctggaaaggcgcgcgatacagggtgacagccccgtacacaaaaatgcacatgctgtgagctcgatgagtagggcgggacacgtggtatcctgtctgaatatggggggaccatcctccaaggctaaatactcctgactgaccgatagtgaaccagtaccgtgagggaaaggcgaaaagaaccccggcgaggggagtgaaaaagaacctgaaaccgtgtacgtacaagcagtgggagcacgcttaggcgtgtgactgcgtaccttttgtataatgggtcagcgacttatattctgtagcaaggttaaccgaataggggagccgaagggaaaccgagtcttaactgggcgttaagttgcagggtatagacccgaaacccggtgatctagccatgggcaggttgaaggttgggtaacactaactggaggaccgaaccgactaatgttgaaaaattagcggatgacttgtggctgggggtgaaaggccaatcaaaccgggagatagctggttctccccgaaagctatttaggtagcgcctcgtgaattcatctccgggggtagagcactgtttcggcaagggggtcatcccgacttaccaacccgatgcaaactgcgaataccggagaatgttatcacgggagacacacggcgggtgctaacgtccgtcgtgaagagggaaacaacccagaccgccagctaaggtcccaaagtcatggttaagtgggaaacgatgtgggaaggcccagacagccaggatgttggcttagaagcagccatcatttaaagaaagcgtaatagctcactggtcgagtcggcctgcgcggaagatgtaacggggctaaaccatgcaccgaagctgcggcagcgacgcttatgcgttgttgggtaggggagcgttctgtaagcctgcgaaggtgtgctgtgaggcatgctggaggtatcagaagtgcgaatgctgacataagtaacgataaagcgggtgaaaagcccgctcgccggaagaccaagggttcctgtccaacgttaatcggggcagggtgagtcgacccctaaggcgaggccgaaaggcgtagtcgatgggaaacaggttaatattcctgtacttggtgttactgcgaaggggggacggagaaggctatgttggccgggcgacggttgtcccggtttaagcgtgtaggctggttttccaggcaaatccggaaaatcaaggctgaggcgtgatgacgaggcactacggtgctgaagcaacaaatgccctgcttccaggaaaagcctctaagcatcaggtaacatcaaatcgtaccccaaaccgacacaggtggtcaggtagagaataccaaggcgcttgagagaactcgggtgaaggaactaggcaaaatggtgccgtaacttcgggagaaggcacgctgatatgtaggtgaggtccctcgcggatggagctgaaatcagtcgaagataccagctggctgcaactgtttattaaaaacacagcactgtgcaaacacgaaagtggacgtatacggtgtgacgcctgcccggtgccggaaggttaattgatggggttagcgcaagcgaagctcttgatcgaagccccggtaaacggcggccgtaactataacggtcctaaggtagcgaaattccttgtcgggtaagttccgacctgcacgaatggcgtaatgatggccaggctgtctccacccgagactcagtgaaattgaactcgctgtgaagatgcagtgtacccgcggcaagacggaaagaccccgtgaacctttactatagcttgacactgaacattgagccttgatgtgtaggataggtgggaggctttgaagtgtggacgccagtctgcatggagccgaccttgaaataccaccctttaatgtttgatgttctaacgttgacccgtaatccgggttgcggacagtgtctggtgggtagtttgactggggcggtctcctcctaaagagtaacggaggagcacgaaggttggctaatcctggtcggacatcaggaggttagtgcaatggcataagccagcttgactgcgagcgtgacggcgcgagcaggtgcgaaagcaggtcatagtgatccggtggttctgaatggaagggccatcgctcaacggataaaaggtactccggggataacaggctgataccgcccaagagttcatatcgacggcggtgtttggcacctcgatgtcggctcatcacatcctggggctgaagtaggtcccaagggtatggctgttcgccatttaaagtggtacgcgagctgggtttagaacgtcgtgagacagttcggtccctatctgccgtgggcgctggagaactgaggggggctgctcctagtacgagaggaccggagtggacgcatcactggtgttcgggttgtcatgccaatggcactgcccggtagctaaatgcggaagagataagtgctgaaagcatctaagcacgaaacttgccccgagatgagttctccctgaccctttaagggtcctgaaggaacgttgaagacgacgacgttgataggccgggtgtgtaagcgcagcgatgcgttgagctaaccggtactaatgaaccgtgaggcttaaccttacaacgccgaagctgttttggcggatgagagaagattttcagcctgatacagattaaatcagaacgcagaagcggtctgataaaacagaatttgcctggcggcagtagcgcggtggtcccacctgaccccatgccgaactcagaagtgaaacgccgtagcgccgatggtagtgtggggtctccccatgcgagagtagggaactgccaggcatcaaataaaacgaaaggctcagtcgaaagactgggcctttcgttttatctgttgtttgtcggtgaacgctctcctgagtaggacaaatccgccgggagcggatttgaacgttgcgaagcaacggcccggagggtggcgggcaggacgcccgccataaactgccaggcatcaaattaagcagaaggccatcctgacggatggcctttttgcgtttctacaaactcttcctgtcgtcatatctacaagccggcgcgccgggaaatgtgcgcggaacccctatttgtttatttttctaaatacattcaaatatgtatccgctcatgagacaataaccctgataaatgcttcaataatattgaaaaaggaagagtatgagtattcaacatttccgtgtcgcccttattcccttttttgcggcattttgccttcctgtttttgctcacccagaaacgctggtgaaagtaaaagatgctgaagatcagttgggtgcacgagtgggttacatcgaactggatctcaacagcggtaagatccttgagagttttcgccccgaagaacgttttccaatgatgagcacttttaaagttctgctatgtggcgcggtattatcccgtgttgacgccgggcaagagcaactcggtcgccgcatacactattctcagaatgacttggttgagtactcaccagtcacagaaaagcatcttacggatggcatgacagtaagagaattatgcagtgctgcaataaccatgagtgataacactgcggccaacttacttctgacaacgatcggaggaccgaaggagctaaccgcttttttgcacaacatgggggatcatgtaactcgccttgatcgttgggaaccggagctgaatgaagccataccaaacgacgagcgtgacaccacgatgcctgcagcaatggcaacaacgttgcgcaaactattaactggcgaactacttactctagcttcccggcaacaattaatagactggatggaggcggataaagttgcaggaccacttctgcgctcggcccttccggctagctggtttattgctgataaatctggagccggtgagcgtgggtctcgcggtatcattgcagcactggggccagatggtaagccctcccgtatcgtagttatctacacgacggggagtcaggcaactatggatgaacgaaatagacagatcgctgagataggtgcctcactgattaagcattggtaactgcagaccaagtttactcatatatactttagattgatttaaaacttcatttttaatttaaaaggatctaggtgaagatcctttttgataatctcatgaccaaaatcccttaacgtgagttttcgttccactgagcgtcagaccccgtagaaaagatcaaaggatcttcttgagatcctttttttctgcgcgtaatctgctgcttgcaaacaaaaaaaccaccgctaccagcggtggtttgtttgccggatcaagagctaccaactctttttccgaaggtaactggcttcagcagagcgcagataccaaatactgtccttctagtgtagccgtagttaggccaccacttcaagaactctgtagcaccgcctacatacctcgctctgctaatcctgttaccagtggctgctgccagtggcgataagtcgtgtcttaccgggttggactcaagacgatagttaccggataaggcgcagcggtcgggctgaacggggggttcgtgcacacagcccagcttggagcgaacgacctacaccgaactgagatacctacagcgtgagctatgagaaagcgccacgcttcccgaagggagaaaggcggacaggtatccggtaagcggcagggtcggaacaggagagcgcacgagggagcttccagggggaaacgcctggtatctttatagtcctgtcgggtttcgccacctctgacttgagcgtcgatttttgtgatgctcgtcaggggggcggagcctatggaaaaacgccagcaacgcggcctttttacggttcctggccttttgctgg

SEQ ID NO: 118 - DNA, 7460 bp, Artificial
  Synthetic
gcggccgcgatctctcacctaccaaacaatgcccccctgcaaaaaataaattcatataaaaaacatacagataaccatctgcggtgatccctatcagtgatagagattgacatccctatcagtgatagagatactgagcacgggtaccggccgctgagaaaaagcgaagcggcactgctctttaacaatttatcagacaatctgtgtgggcactcgaagatacggattcttaacgtcgcaagacgaaaaatgaataccaagtctcaagagtgaacacgtaattcattacgaagtttaattctttgagcgtcaaacttttaaattgaagagtttgatcatggctcagattgaacgctggcggcaggcctaacacatgcaagtcgaacggtaacaggaagaagcttgcttctttgctgacgagtggcggacgggtgagtaatgtctgggaaactgcctgatggagggggataactactggaaacggtagctaataccgcataacagtttatgccgcatggcataagagtgaaaggcgctttcgggtgtcgccatcggatgtgcccagatgggattagctagtaggtggggtaacggctcacctaggcgacgatccctagctggtctgagaggatgaccagccacactggaactgagacacggtccagactcctacgggaggcagcagtggggaatattgcacaatgggcgcaagcctgatgcagccatgccgcgtgtatgaagaaggccttcgggttgtaaagtactttcagcggggaggaagggagtaaagttaatacctttgctcattgacgttacccgcagaagaagcaccggctaactccgtgccagcagccgcggtaatacggagggtgcaagcgttaatcggaattactgggcgtaaagcgcacgcaggcggtttgttaagtcagatgtgaaatccccgggctcaacctgggaactgcatctgatactggcaagcttgagtctcgtagaggggggtagaattccaggtgtagcggtgaaatgcgtagagatctggaggaataccggtggcgaaggcggccccctggacgaagactgacgctcaggtgcgaaagcgtggggagcaaacaggattagataccctggtagtccacgccgtaaacgatgtcgacttggaggttgtgcccttgaggcgtggcttccggagctaacgcgttaagtcgaccgcctggggagtacggccgcaaggttaaaactcaaatgaattgacgggggcccgcacaagcggtggagcatgtggtttaattcgatgcaacgcgaagaaccttacctggtcttgacatccacggaagttttcagagatgagaatgtgccttcgggaaccgtgagacaggtgctgcatggctgtcgtcagctcgtgttgtgaaatgttgggttaagtcccgcaacgagcgcaacccttatcctttgttgccagcggtccggccgggaactcaaaggagactgccagtgataaactggaggaaggtggggatgacgtcaagtcatcatggcccttacgaccagggctacacacgtgctacaatggcgcatacaaagagaagcgacctcgcgagagcaagcggacctcataaagtgcgtcgtagtccggattggagtctgcaactcgactccatgaagtcggaatcgctagtaatcgtggatcagaatgccacggtgaatacgttcccgggccttgtacacaccgcccgtcacaccatgggagtgggttgcaaaagaagtaggtagcttaaccttcgggagggcgcttaccactttgtgattcatgactggggtgaagtcgtaacaaggtaaccgtaggggaacctgcggttggatcatgtggttaccttaaagaagcgtactttgtagtgctcacacagattgtctgatagaaagtgaaaagcaaggcgtttacgcgttgggagtgaggctgaagagaataaggccgttcgctttctattaatgaaagctcaccctacacgaaaatatcacgcaacgcgtgataagcaattttcgtgtccccttcgtctagaggcccaggacaccgccctttcacggcggtaacaggggttcgaatcccctaggggacgccacttgctggtttgtgagtgaaagtcgccgaccttaatatctcaaaactcatcttcgggtgatgtttgagatatttgctctttaaaaatctggatcaagctgaaaattgaaacactgaacaacgagagttgttcgtgagtctctcaaattttcgcaacacgatgatgaatcgaaagaaacatcttcgggttgtgaggttaagcgactaagcgtacacggtggatgccctggcagtcagaggcgatgaaggacgtgctaatctgcgataagcgtcggtaaggtgatatgaaccgttataaccggcgatttccgaatggggaaacccagtgtgtttcgacacactatcattaactgaatccataggttaatgaggcgaaccgggggaactgaaacatctaagtaccccgaggaaaagaaatcaaccgagattcccccagtagcggcgagcgaacggggagcagcccagagcctgaatcagtgtgtgtgttagtggaagcgtctggaaaggcgcgcgatacagggtgacagccccgtacacaaaaatgcacatgctgtgagctcgatgagtagggcgggacacgtggtatcctgtctgaatatggggggaccatcctccaaggctaaatactcctgactgaccgatagtgaaccagtaccgtgagggaaaggcgaaaagaaccccggcgaggggagtgaaaaagaacctgaaaccgtgtacgtacaagcagtgggagcacgcttaggcgtgtgactgcgtaccttttgtataatgggtcagcgacttatattctgtagcaaggttaaccgaataggggagccgaagggaaaccgagtcttaactgggcgttaagttgcagggtatagacccgaaacccggtgatctagccatgggcaggttgaaggttgggtaacactaactggaggaccgaaccgactaatgttgaaaaattagcggatgacttgtggctgggggtgaaaggccaatcaaaccgggagatagctggttctccccgaaagctatttaggtagcgcctcgtgaattcatctccgggggtagagcactgtttcggcaagggggtcatcccgacttaccaacccgatgcaaactgcgaataccggagaatgttatcacgggagacacacggcgggtgctaacgtccgtcgtgaagagggaaacaacccagaccgccagctaaggtcccaaagtcatggttaagtgggaaacgatgtgggaaggcccagacagccaggatgttggcttagaagcagccatcatttaaagaaagcgtaatagctcactggtcgagtcggcctgcgcggaagatgtaacggggctaaaccatgcaccgaagctgcggcagcgacgcttatgcgttgttgggtaggggagcgttctgtaagcctgcgaaggtgtgctgtgaggcatgctggaggtatcagaagtgcgaatgctgacataagtaacgataaagcgggtgaaaagcccgctcgccggaagaccaagggttcctgtccaacgttaatcggggcagggtgagtcgacccctaaggcgaggccgaaaggcgtagtcgatgggaaacaggttaatattcctgtacttggtgttactgcgaaggggggacggagaaggctatgttggccgggcgacggttgtcccggtttaagcgtgtaggctggttttccaggcaaatccggaaaatcaaggctgaggcgtgatgacgaggcactacggtgctgaagcaacaaatgccctgcttccaggaaaagcctctaagcatcaggtaacatcaaatcgtaccccaaaccgacacaggtggtcaggtagagaataccaaggcgcttgagagaactcgggtgaaggaactaggcaaaatggtgccgtaacttcgggagaaggcacgctgatatgtaggtgaggtccctcgcggatggagctgaaatcagtcgaagataccagctggctgcaactgtttattaaaaacacagcactgtgcaaacacgaaagtggacgtatacggtgtgacgcctgcccggtgccggaaggttaattgatggggttagcgcaagcgaagctcttgatcgaagccccggtaaacggcggccgtaactataacggtcctaaggtagcgaaattccttgtcgggtaagttccgacctgcacgaatggcgtaatgatggccaggctgtctccacccgagactcagtgaaattgaactcgctgtgaagatgcagtgtacccgcggcaagacggaaagaccccgtgaacctttactatagcttgacactgaacattgagccttgatgtgtaggataggtgggaggctttgaagtgtggacgccagtctgcatggagccgaccttgaaataccaccctttaatgtttgatgttctaacgttgacccgtaatccgggttgcggacagtgtctggtgggtagtttgactggggcggtctcctcctaaagagtaacggaggagcacgaaggttggctaatcctggtcggacatcaggaggttagtgcaatggcataagccagcttgactgcgagcgtgacggcgcgagcaggtgcgaaagcaggtcatagtgatccggtggttctgaatggaagggccatcgctcaacggataaaaggtactccggggataacaggctgataccgcccaagagttcatatcgacggcggtgtttggcacctcgatgtcggctcatcacatcctggggctgaagtaggtcccaagggtatggctgttcgccatttaaagtggtacgcgagctgggtttagaacgtcgtgagacagttcggtccctatctgccgtgggcgctggagaactgaggggggctgctcctagtacgagaggaccggagtggacgcatcactggtgttcgggttgtcatgccaatggcactgcccggtagctaaatgcggaagagataagtgctgaaagcatctaagcacgaaacttgccccgagatgagttctccctgaccctttaagggtcctgaaggaacgttgaagacgacgacgttgataggccgggtgtgtaagcgcagcgatgcgttgagctaaccggtactaatgaaccgtgaggcttaaccttacaacgccgaagctgttttggcggatgagagaagattttcagcctgatacagattaaatcagaacgcagaagcggtctgataaaacagaatttgcctggcggcagtagcgcggtggtcccacctgaccccatgccgaactcagaagtgaaacgccgtagcgccgatggtagtgtggggtctccccatgcgagagtagggaactgccaggcatcaaataaaacgaaaggctcagtcgaaagactgggcctttcgttttatctgttgtttgtcggtgaacgctctcctgagtaggacaaatccgccgggagcggatttgaacgttgcgaagcaacggcccggagggtggcgggcaggacgcccgccataaactgccaggcatcaaattaagcagaaggccatcctgacggatggcctttttgcgtttctacaaactcttcctgtcgtcatatctacaagccggcgcgccgggaaatgtgcgcggaacccctatttgtttatttttctaaatacattcaaatatgtatccgctcatgagacaataaccctgataaatgcttcaataatattgaaaaaggaagagtatgagtattcaacatttccgtgtcgcccttattcccttttttgcggcattttgccttcctgtttttgctcacccagaaacgctggtgaaagtaaaagatgctgaagatcagttgggtgcacgagtgggttacatcgaactggatctcaacagcggtaagatccttgagagttttcgccccgaagaacgttttccaatgatgagcacttttaaagttctgctatgtggcgcggtattatcccgtgttgacgccgggcaagagcaactcggtcgccgcatacactattctcagaatgacttggttgagtactcaccagtcacagaaaagcatcttacggatggcatgacagtaagagaattatgcagtgctgcaataaccatgagtgataacactgcggccaacttacttctgacaacgatcggaggaccgaaggagctaaccgcttttttgcacaacatgggggatcatgtaactcgccttgatcgttgggaaccggagctgaatgaagccataccaaacgacgagcgtgacaccacgatgcctgcagcaatggcaacaacgttgcgcaaactattaactggcgaactacttactctagcttcccggcaacaattaatagactggatggaggcggataaagttgcaggaccacttctgcgctcggcccttccggctagctggtttattgctgataaatctggagccggtgagcgtgggtctcgcggtatcattgcagcactggggccagatggtaagccctcccgtatcgtagttatctacacgacggggagtcaggcaactatggatgaacgaaatagacagatcgctgagataggtgcctcactgattaagcattggtaactgcagaccaagtttactcatatatactttagattgatttaaaacttcatttttaatttaaaaggatctaggtgaagatcctttttgataatctcatgaccaaaatcccttaacgtgagttttcgttccactgagcgtcagaccccgtagaaaagatcaaaggatcttcttgagatcctttttttctgcgcgtaatctgctgcttgcaaacaaaaaaaccaccgctaccagcggtggtttgtttgccggatcaagagctaccaactctttttccgaaggtaactggcttcagcagagcgcagataccaaatactgtccttctagtgtagccgtagttaggccaccacttcaagaactctgtagcaccgcctacatacctcgctctgctaatcctgttaccagtggctgctgccagtggcgataagtcgtgtcttaccgggttggactcaagacgatagttaccggataaggcgcagcggtcgggctgaacggggggttcgtgcacacagcccagcttggagcgaacgacctacaccgaactgagatacctacagcgtgagctatgagaaagcgccacgcttcccgaagggagaaaggcggacaggtatccggtaagcggcagggtcggaacaggagagcgcacgagggagcttccagggggaaacgcctggtatctttatagtcctgtcgggtttcgccacctctgacttgagcgtcgatttttgtgatgctcgtcaggggggcggagcctatggaaaaacgccagcaacgcggcctttttacggttcctggccttttgctgg

SEQ ID NO: 119 - DNA, 7459 bp, Artificial
  Synthetic
gcggccgcgatctctcacctaccaaacaatgcccccctgcaaaaaataaattcatataaaaaacatacagataaccatctgcggtgatccctatcagtgatagagattgacatccctatcagtgatagagatactgagcacgggtaccggccgctgagaaaaagcgaagcggcactgctctttaacaatttatcagacaatctgtgtgggcactcgaagatacggattcttaacgtcgcaagacgaaaaatgaataccaagtctcaagagtgaacacgtaattcattacgaagtttaattctttgagcgtcaaacttttaaattgaagagtttgatcatggctcagattgaacgctggcggcaggcctaacacatgcaagtcgaacgcttctttcctcccgagtgcttgcactcaattggaaagaggagtggcggacgggtgagtaatgtctgggaaactgcctgatggagggggataactactggaaacggtagctaataccgcataacgtcgcaagaccaaagagggggaccttcgggcctcttgccatcggatgtgcccagatgggattagctagtaggtggggtaacggctcacctaggcgacgatccctagctggtctgagaggatgaccagccacactggaactgagacacggtccagactcctacgggaggcagcagtggggaatattgcacaatgggcgcaagcctgatgcagccatgccgcgtgtatgaagaaggccttcgggttgtaaagtactttcagcggggaggaagggagtaaagttaatacctttgctcattgacgttacccgcagaagaagcaccggctaactccgtgccagcagccgcggtaatacggagggtgcaagcgttaatcggaattactgggcgtaaagcgcacgcaggcggtttgttaagtcagatgtgaaatccccgggctcaacctgggaactgcatctgatactggcaagcttgagtctcgtagaggggggtagaattccaggtgtagcggtgaaatgcgtagagatctggaggaataccggtggcgaaggcggccccctggacgaagactgacgctcaggtgcgaaagcgtggggagcaaacaggattagataccctggtagtccacgccgtaaacgatgtcgacttggaggttgtgcccttgaggcgtggcttccggagctaacgcgttaagtcgaccgcctggggagtacggccgcaaggttaaaactcaaatgaattgacgggggcccgcacaagcggtggagcatgtggtttaattcgatgcaacgcgaagaaccttacctggtcttgacatccacggaagttttcagagatgagaatgtgccttcgggaaccgtgagacaggtgctgcatggctgtcgtcagctcgtgttgtgaaatgttgggttaagtcccgcaacgagcgcaacccttatcctttgttgccagcggtccggccgggaactcaaaggagactgccagtgataaactggaggaaggtggggatgacgtcaagtcatcatggcccttacgaccagggctacacacgtgctacaatggcgcatacaaagagaagcgacctcgcgagagcaagcggacctcataaagtgcgtcgtagtccggattggagtctgcaactcgactccatgaagtcggaatcgctagtaatcgtggatcagaatgccacggtgaatacgttcccgggccttgtacacaccgcccgtcacaccatgggagtgggttgcaaaagaagtaggtagcttaaccttcgggagggcgcttaccactttgtgattcatgactggggtgaagtcgtaacaaggtaaccgtaggggaacctgcggttggatcatgtggttaccttaaagaagcgtactttgtagtgctcacacagattgtctgatagaaagtgaaaagcaaggcgtttacgcgttgggagtgaggctgaagagaataaggccgttcgctttctattaatgaaagctcaccctacacgaaaatatcacgcaacgcgtgataagcaattttcgtgtccccttcgtctagaggcccaggacaccgccctttcacggcggtaacaggggttcgaatcccctaggggacgccacttgctggtttgtgagtgaaagtcgccgaccttaatatctcaaaactcatcttcgggtgatgtttgagatatttgctctttaaaaatctggatcaagctgaaaattgaaacactgaacaacgagagttgttcgtgagtctctcaaattttcgcaacacgatgatgaatcgaaagaaacatcttcgggttgtgaggttaagcgactaagcgtacacggtggatgccctggcagtcagaggcgatgaaggacgtgctaatctgcgataagcgtcggtaaggtgatatgaaccgttataaccggcgatttccgaatggggaaacccagtgtgtttcgacacactatcattaactgaatccataggttaatgaggcgaaccgggggaactgaaacatctaagtaccccgaggaaaagaaatcaaccgagattcccccagtagcggcgagcgaacggggagcagcccagagcctgaatcagtgtgtgtgttagtggaagcgtctggaaaggcgcgcgatacagggtgacagccccgtacacaaaaatgcacatgctgtgagctcgatgagtagggcgggacacgtggtatcctgtctgaatatggggggaccatcctccaaggctaaatactcctgactgaccgatagtgaaccagtaccgtgagggaaaggcgaaaagaaccccggcgaggggagtgaaaaagaacctgaaaccgtgtacgtacaagcagtgggagcacgcttaggcgtgtgactgcgtaccttttgtataatgggtcagcgacttatattctgtagcaaggttaaccgaataggggagccgaagggaaaccgagtcttaactgggcgttaagttgcagggtatagacccgaaacccggtgatctagccatgggcaggttgaaggttgggtaacactaactggaggaccgaaccgactaatgttgaaaaattagcggatgacttgtggctgggggtgaaaggccaatcaaaccgggagatagctggttctccccgaaagctatttaggtagcgcctcgtgaattcatctccgggggtagagcactgtttcggcaagggggtcatcccgacttaccaacccgatgcaaactgcgaataccggagaatgttatcacgggagacacacggcgggtgctaacgtccgtcgtgaagagggaaacaacccagaccgccagctaaggtcccaaagtcatggttaagtgggaaacgatgtgggaaggcccagacagccaggatgttggcttagaagcagccatcatttaaagaaagcgtaatagctcactggtcgagtcggcctgcgcggaagatgtaacggggctaaaccatgcaccgaagctgcggcagcgacgcttatgcgttgttgggtaggggagcgttctgtaagcctgcgaaggtgtgctgtgaggcatgctggaggtatcagaagtgcgaatgctgacataagtaacgataaagcgggtgaaaagcccgctcgccggaagaccaagggttcctgtccaacgttaatcggggcagggtgagtcgacccctaaggcgaggccgaaaggcgtagtcgatgggaaacaggttaatattcctgtacttggtgttactgcgaaggggggacggagaaggctatgttggccgggcgacggttgtcccggtttaagcgtgtaggctggttttccaggcaaatccggaaaatcaaggctgaggcgtgatgacgaggcactacggtgctgaagcaacaaatgccctgcttccaggaaaagcctctaagcatcaggtaacatcaaatcgtaccccaaaccgacacaggtggtcaggtagagaataccaaggcgcttgagagaactcgggtgaaggaactaggcaaaatggtgccgtaacttcgggagaaggcacgctgatatgtaggtgaggtccctcgcggatggagctgaaatcagtcgaagataccagctggctgcaactgtttattaaaaacacagcactgtgcaaacacgaaagtggacgtatacggtgtgacgcctgcccggtgccggaaggttaattgatggggttagcgcaagcgaagctcttgatcgaagccccggtaaacggcggccgtaactataacggtcctaaggtagcgaaattccttgtcgggtaagttccgacctgcacgaatggcgtaatgatggccaggctgtctccacccgagactcagtgaaattgaactcgctgtgaagatgcagtgtacccgcggcaagacggaaagaccccgtgaacctttactatagcttgacactgaacattgagccttgatgtgtaggataggtgggaggctttgaagtgtggacgccagtctgcatggagccgaccttgaaataccaccctttaatgtttgatgttctaacgttgacccgtaatccgggttgcggacagtgtctggtgggtagtttgactggggcggtctcctcctaaagagtaacggaggagcacgaaggttggctaatcctggtcggacatcaggaggttagtgcaatggcataagccagcttgactgcgagcgtgacggcgcgagcaggtgcgaaagcaggtcatagtgatccggtggttctgaatggaagggccatcgctcaacggataaaaggtactccggggataacaggctgataccgcccaagagttcatatcgacggcggtgtttggcacctcgatgtcggctcatcacatcctggggctgaagtaggtcccaagggtatggctgttcgccatttaaagtggtacgcgagctgggtttagaacgtcgtgagacagttcggtccctatctgccgtgggcgctggagaactgaggggggctgctcctagtacgagaggaccggagtggacgcatcactggtgttcgggttgtcatgccaatggcactgcccggtagctaaatgcggaagagataagtgctgaaagcatctaagcacgaaacttgccccgagatgagttctccctgaccctttaagggtcctgaaggaacgttgaagacgacgacgttgataggccgggtgtgtaagcgcagcgatgcgttgagctaaccggtactaatgaaccgtgaggcttaaccttacaacgccgaagctgttttggcggatgagagaagattttcagcctgatacagattaaatcagaacgcagaagcggtctgataaaacagaatttgcctggcggcagtagcgcggtggtcccacctgaccccatgccgaactcagaagtgaaacgccgtagcgccgatggtagtgtggggtctccccatgcgagagtagggaactgccaggcatcaaataaaacgaaaggctcagtcgaaagactgggcctttcgttttatctgttgtttgtcggtgaacgctctcctgagtaggacaaatccgccgggagcggatttgaacgttgcgaagcaacggcccggagggtggcgggcaggacgcccgccataaactgccaggcatcaaattaagcagaaggccatcctgacggatggcctttttgcgtttctacaaactcttcctgtcgtcatatctacaagccggcgcgccgggaaatgtgcgcggaacccctatttgtttatttttctaaatacattcaaatatgtatccgctcatgagacaataaccctgataaatgcttcaataatattgaaaaaggaagagtatgagtattcaacatttccgtgtcgcccttattcccttttttgcggcattttgccttcctgtttttgctcacccagaaacgctggtgaaagtaaaagatgctgaagatcagttgggtgcacgagtgggttacatcgaactggatctcaacagcggtaagatccttgagagttttcgccccgaagaacgttttccaatgatgagcacttttaaagttctgctatgtggcgcggtattatcccgtgttgacgccgggcaagagcaactcggtcgccgcatacactattctcagaatgacttggttgagtactcaccagtcacagaaaagcatcttacggatggcatgacagtaagagaattatgcagtgctgcaataaccatgagtgataacactgcggccaacttacttctgacaacgatcggaggaccgaaggagctaaccgcttttttgcacaacatgggggatcatgtaactcgccttgatcgttgggaaccggagctgaatgaagccataccaaacgacgagcgtgacaccacgatgcctgcagcaatggcaacaacgttgcgcaaactattaactggcgaactacttactctagcttcccggcaacaattaatagactggatggaggcggataaagttgcaggaccacttctgcgctcggcccttccggctagctggtttattgctgataaatctggagccggtgagcgtgggtctcgcggtatcattgcagcactggggccagatggtaagccctcccgtatcgtagttatctacacgacggggagtcaggcaactatggatgaacgaaatagacagatcgctgagataggtgcctcactgattaagcattggtaactgcagaccaagtttactcatatatactttagattgatttaaaacttcatttttaatttaaaaggatctaggtgaagatcctttttgataatctcatgaccaaaatcccttaacgtgagttttcgttccactgagcgtcagaccccgtagaaaagatcaaaggatcttcttgagatcctttttttctgcgcgtaatctgctgcttgcaaacaaaaaaaccaccgctaccagcggtggtttgtttgccggatcaagagctaccaactctttttccgaaggtaactggcttcagcagagcgcagataccaaatactgtccttctagtgtagccgtagttaggccaccacttcaagaactctgtagcaccgcctacatacctcgctctgctaatcctgttaccagtggctgctgccagtggcgataagtcgtgtcttaccgggttggactcaagacgatagttaccggataaggcgcagcggtcgggctgaacggggggttcgtgcacacagcccagcttggagcgaacgacctacaccgaactgagatacctacagcgtgagctatgagaaagcgccacgcttcccgaagggagaaaggcggacaggtatccggtaagcggcagggtcggaacaggagagcgcacgagggagcttccagggggaaacgcctggtatctttatagtcctgtcgggtttcgccacctctgacttgagcgtcgatttttgtgatgctcgtcaggggggcggagcctatggaaaaacgccagcaacgcggcctttttacggttcctggccttttgctgg

SEQ ID NO: 120 - DNA, 5291 bp, Artificial
  Synthetic
aacaccccttgtattactgtttatgtaagcagacagttttattgttcatgatgatatatttttatcttgtgcaatgtaacatcagagattttgagacacaacgtggctttccatcaaaaaaatattgacaacataaaaaactttgtgttatacttgtggaattgtgagcggataacaattctatatctgttattttttccaaccacagatctatggtgagcaagggcgaggaggataacatggccatcatcaaggagttcatgcgcttcaaggtgcacatggagggctccgtgaacggccacgagttcgagatcgagggcgagggcgagggccgcccctacgagggcacccagaccgccaagctgaaggtgaccaagggcggccccctgcccttcgcctgggacatcctgtcccctcagttcatgtacggctccaaggcctacgtgaagcaccccgccgacatccccgactacttgaagctgtccttccccgagggcttcaagtgggagcgcgtgatgaacttcgaggacggcggcgtggtgaccgtgacccaggactcctccctacaggacggcgagttcatctacaaggtgaagctgcgcggcaccaacttcccctccgacggccccgtaatgcagaagaagaccatgggctgggaggcctcctccgagcggatgtaccccgaggacggcgccctgaagggcgagatcaagcagaggctgaagctgaaggacggcggccactacgacgccgaggtcaagaccacctacaaggccaagaagcccgtgcagctgcccggcgcctacaacgtcaacatcaagctggacatcacctcccacaacgaggactacaccatcgtggaacagtacgagcgcgccgagggccgccactccaccggcggcatggacgagctgtacaagtaagtcgaccggctgctaacaaagcccgcggccgctgaagatcgatctcgacgagtgagagaagattttcagcctgatacagattaaatcagaacgcagaagcggtctgataaaacagaatttgcctggcggcagtagcgcggtggtcccacctgaccccatgccgaactcagaagtgaaacgccgtagcgccgatggtagtgtggggtcaccccatgcgagagtagggaactgccaggcatcaaataaaacgaaaggctcagtcgaaagactgggcctttcgttttatctgttgtttgtcggtgaacgctctcctgagtaggacaaatccgccgggagcggatttgaacgttgcgaagcaacggcccggagggtggcgggcaggacgcccgccataaactgccaggcatcaaattaagcagaaggccatcctgacggatggcctttttgcgtttctacagagcgtcagaccccttaataagatgatcttcttgagatcgttttggtctgcgcgtaatctcttgctctgaaaacgaaaaaaccgccttgcagggcggtttttcgaaggttctctgagctaccaactctttgaaccgaggtaactggcttggaggagcgcagtcaccaaaacttgtcctttcagtttagccttaaccggcgcatgacttcaagactaactcctctaaatcaattaccagtggctgctgccagtggtgcttttgcatgtctttccgggttggactcaagacgatagttaccggataaggcgcagcggtcggactgaacggggggttcgtgcatacagtccagcttggagcgaactgcctacccggaactgagtgtcaggcgtggaatgagacaaacgcggccataacagcggaatgacaccggtaaaccgaaaggcaggaacaggagagcgcacgagggagccgccagggggaaacgcctggtatctttatagtcctgtcgggtttcgccaccactgatttgagcgtcagatttcgtgatgcttgtcaggggggcggagcctatggaaaaacggctttgccgcggccctctcggatctgtatggtgcactctcagtacaatctgctctgatgccgcatagttaagccagtatacactccgctatcgctacgtgactgcctcgacctgcagcaattccaacgccatcaaaaataattcgcgtctggccttcctgtagccagctttcatcaacattaaatgtgagcgagtaacaacccgtcggattctccgtgggaacaaacggcggattgaccgtaatgggataggtcacgttggtgtagatgggcgcatcgtaaccgtgcatctgccagtttgaggggacgacgacagtatcggcctcaggaagatcgcactccagccagctttccggcaccgcttctggtgccggaaaccaggcaaagcgccattcgccattcaggctgcgcaactgttgggaagggcgatcggtgcgggcctcttcgctattacgccagctggcgaaagggggatgtgctgcaaggcgattaagttgggtaacgccagggttttcccagtcacgacgttgtaaaacgacggccagtgaatccgtaatcatggtcatagctgtttcctgtgtgaaattgttatccgctcacaattccacacaacatacgagccggaagcataaagtgtaaagcctggggtgcctaatgagtgagctaacttacattaattgcgttgcgctcactgcccgctttccagtcgggaaacctgtcgtgccagctgcattaatgaatcggccaacgcgcggggagaggcggtttgcgtattgggcgccagggtggtttttcttttcaccagtgagacgggcaacagctgattgcccttcaccgcctggccctgagagagttgcagcaagcggtccacgctggtttgccccagcaggcgaaaatcctgtttgatggtggttaacggcgggatataacatgagctgtcttcggtatcgtcgtatcccactaccgagatatccgcaccaacgcgcagcccggactcggtaatggcgcgcattgcgcccagcgccatctgatcgttggcaaccagcatcgcagtgggaacgatgccctcattcagcatttgcatggtttgttgaaaaccggacatggcactccagtcgccttcccgttccgctatcggctgaatttgattgcgagtgagatatttatgccagccagccagacgcagacgcgccgagacagaacttaatgggcccgctaacagcgcgatttgctggtgacccaatgcgaccagatgctccacgcccagtcgcgtaccgtcttcatgggagaaaataatactgttgatgggtgtctggtcagagacatcaagaaataacgccggaacattagtgcaggcagcttccacagcaatggcatcctggtcatccagcggatagttaatgatcagcccactgacgcgttgcgcgagaagattgtgcaccgccgctttacaggcttcgacgccgcttcgttctaccatcgacaccaccacgctggcacccagttgatcggcgcgagatttaatcgccgcgacaatttgcgacggcgcgtgcagggccagactggaggtggcaacgccaatcagcaacgactgtttgcccgccagttgttgtgccacgcggttgggaatgtaattcagctccgccatcgccgcttccactttttcccgcgttttcgcagaaacgtggctggcctggttcaccacgcgggaaacggtctgataagagacaccggcatactctgcgacatcgtataacgttactggtttcacattcaccaccctgaattgactctcttccgggcgctatcatgccataccgcgaaaggttttgcaccattccatggtgtcggaattgctgcaggtcgagggggtcatggctgcgccccgacacccgccaacacccgctgacgcgccctgacgggcttgtctgctcccggcatccgcttacagacaagctgtgaccgtctccgggagctgcatgtgtcagaggttttcaccgtcatcaccgaaacgcgcgaggcaggatggcgcccaacagtcccccggccacggggcctgccaccatacccacgccgaaacaagcgctcatgagcccgaagtggcgagcccgatcttccccatcggtgatgtcggcgatataggcgccagcaaccgcacctgtggcgccggtgatgccggccacgatgcgtccggcgtagaggatccgtcgacctgcaggggggggggggcgctgaggtctgcctcgtgaagaaggtgttgctgactcataccaggcctgaatcgccccatcatccagccagaaagtgagggagccacggttgatgagagctttgttgtaggtggaccagttggtgattttgaacttttgctttgccacggaacggtctgcgttgtcgggaagatgcgtgatctgatccttcaactcagcaaaagttcgatttattcaacaaagccgccgtcccgtcaagtcagcgtaatgctctgccagtgttacaaccaattaaccaattctgattagaaaaactcatcgagcatcaaatgaaactgcaatttattcatatcaggattatcaataccatatttttgaaaaagccgtttctgtaatgaaggagaaaactcaccgaggcagttccataggatggcaagatcctggtatcggtctgcgattccgactcgtccaacatcaatacaacctattaatttcccctcgtcaaaaataaggttatcaagtgagaaatcaccatgagtgacgactgaatccggtgagaatggcaaaagcttatgcatttctttccagacttgttcaacaggccagccattacgctcgtcatcaaaatcactcgcatcaaccaaaccgttattcattcgtgattgcgcctgagcgagacgaaatacgcgatcgctgttaaaaggacaattacaaacaggaatcgaatgcaaccggcgcaggaacactgccagcgcatcaacaatattttcacctgaatcaggatattcttctaatacctggaatgctgttttcccggggatcgcagtggtgagtaaccatgcatcatcaggagtacggataaaatgcttgatggtcggaagaggcataaattccgtcagccagtttagtctgaccatctcatctgtaacatcattggcaacgctacctttgccatgtttcagaaacaactctggcgcatcgggcttcccatacaatcgatagattgtcgcacctgattgcccgacattatcgcgagcccatttatacccatataaatcagcatccatgttggaatttaatcgcggcctcgagcaagacgtttcccgttgaatatggctcat

SEQ ID NO: 121 - DNA, 5282 bp, Artificial
  Synthetic
aacaccccttgtattactgtttatgtaagcagacagttttattgttcatgatgatatatttttatcttgtgcaatgtaacatcagagattttgagacacaacgtggctttccatcaaaaaaatattgacaacataaaaaactttgtgttatacttgtggaattgtgagcggataacaattctatatctgttattttttccaaccacagatctatgagcgagctgattaaggagaacatgcacatgaagctgtacatggagggcaccgtggacaaccatcacttcaagtgcacatccgagggcgaaggcaagccctacgagggcacccagaccatgagaatcaaggtggtcgagggcggccctctccccttcgccttcgacatcctggctactagcttcctctacggcagcaagaccttcatcaaccacacccagggcatccccgacttcttcaagcagtccttccctgagggcttcacatgggagagagtcaccacatacgaagacgggggcgtgctgaccgctacccaggacaccagcctccaggacggctgcctcatctacaacgtcaagatcagaggggtgaacttcacatccaacggccctgtgatgcagaagaaaacactcggctgggaggccttcaccgagacgctgtaccccgctgacggcggcctggaaggcagaaacgacatggccctgaagctcgtgggcgggagccatctgatcgcaaacgccaagaccacatatagatccaagaaacccgctaagaacctcaagatgcctggcgtctactatgtggactacagactggaaagaatcaaggaggccaacaacgagacctacgtcgagcagcacgaggtggcagtggccagatactgcgacctccctagcaaactggggcacaagcttaattaagtcgaccggctgctaacaaagcccgcggccgctgaagatcgatctcgacgagtgagagaagattttcagcctgatacagattaaatcagaacgcagaagcggtctgataaaacagaatttgcctggcggcagtagcgcggtggtcccacctgaccccatgccgaactcagaagtgaaacgccgtagcgccgatggtagtgtggggtcaccccatgcgagagtagggaactgccaggcatcaaataaaacgaaaggctcagtcgaaagactgggcctttcgttttatctgttgtttgtcggtgaacgctctcctgagtaggacaaatccgccgggagcggatttgaacgttgcgaagcaacggcccggagggtggcgggcaggacgcccgccataaactgccaggcatcaaattaagcagaaggccatcctgacggatggcctttttgcgtttctacagagcgtcagaccccttaataagatgatcttcttgagatcgttttggtctgcgcgtaatctcttgctctgaaaacgaaaaaaccgccttgcagggcggtttttcgaaggttctctgagctaccaactctttgaaccgaggtaactggcttggaggagcgcagtcaccaaaacttgtcctttcagtttagccttaaccggcgcatgacttcaagactaactcctctaaatcaattaccagtggctgctgccagtggtgcttttgcatgtctttccgggttggactcaagacgatagttaccggataaggcgcagcggtcggactgaacggggggttcgtgcatacagtccagcttggagcgaactgcctacccggaactgagtgtcaggcgtggaatgagacaaacgcggccataacagcggaatgacaccggtaaaccgaaaggcaggaacaggagagcgcacgagggagccgccagggggaaacgcctggtatctttatagtcctgtcgggtttcgccaccactgatttgagcgtcagatttcgtgatgcttgtcaggggggcggagcctatggaaaaacggctttgccgcggccctctcggatctgtatggtgcactctcagtacaatctgctctgatgccgcatagttaagccagtatacactccgctatcgctacgtgactgcctcgacctgcagcaattccaacgccatcaaaaataattcgcgtctggccttcctgtagccagctttcatcaacattaaatgtgagcgagtaacaacccgtcggattctccgtgggaacaaacggcggattgaccgtaatgggataggtcacgttggtgtagatgggcgcatcgtaaccgtgcatctgccagtttgaggggacgacgacagtatcggcctcaggaagatcgcactccagccagctttccggcaccgcttctggtgccggaaaccaggcaaagcgccattcgccattcaggctgcgcaactgttgggaagggcgatcggtgcgggcctcttcgctattacgccagctggcgaaagggggatgtgctgcaaggcgattaagttgggtaacgccagggttttcccagtcacgacgttgtaaaacgacggccagtgaatccgtaatcatggtcatagctgtttcctgtgtgaaattgttatccgctcacaattccacacaacatacgagccggaagcataaagtgtaaagcctggggtgcctaatgagtgagctaacttacattaattgcgttgcgctcactgcccgctttccagtcgggaaacctgtcgtgccagctgcattaatgaatcggccaacgcgcggggagaggcggtttgcgtattgggcgccagggtggtttttcttttcaccagtgagacgggcaacagctgattgcccttcaccgcctggccctgagagagttgcagcaagcggtccacgctggtttgccccagcaggcgaaaatcctgtttgatggtggttaacggcgggatataacatgagctgtcttcggtatcgtcgtatcccactaccgagatatccgcaccaacgcgcagcccggactcggtaatggcgcgcattgcgcccagcgccatctgatcgttggcaaccagcatcgcagtgggaacgatgccctcattcagcatttgcatggtttgttgaaaaccggacatggcactccagtcgccttcccgttccgctatcggctgaatttgattgcgagtgagatatttatgccagccagccagacgcagacgcgccgagacagaacttaatgggcccgctaacagcgcgatttgctggtgacccaatgcgaccagatgctccacgcccagtcgcgtaccgtcttcatgggagaaaataatactgttgatgggtgtctggtcagagacatcaagaaataacgccggaacattagtgcaggcagcttccacagcaatggcatcctggtcatccagcggatagttaatgatcagcccactgacgcgttgcgcgagaagattgtgcaccgccgctttacaggcttcgacgccgcttcgttctaccatcgacaccaccacgctggcacccagttgatcggcgcgagatttaatcgccgcgacaatttgcgacggcgcgtgcagggccagactggaggtggcaacgccaatcagcaacgactgtttgcccgccagttgttgtgccacgcggttgggaatgtaattcagctccgccatcgccgcttccactttttcccgcgttttcgcagaaacgtggctggcctggttcaccacgcgggaaacggtctgataagagacaccggcatactctgcgacatcgtataacgttactggtttcacattcaccaccctgaattgactctcttccgggcgctatcatgccataccgcgaaaggttttgcaccattccatggtgtcggaattgctgcaggtcgagggggtcatggctgcgccccgacacccgccaacacccgctgacgcgccctgacgggcttgtctgctcccggcatccgcttacagacaagctgtgaccgtctccgggagctgcatgtgtcagaggttttcaccgtcatcaccgaaacgcgcgaggcaggatggcgcccaacagtcccccggccacggggcctgccaccatacccacgccgaaacaagcgctcatgagcccgaagtggcgagcccgatcttccccatcggtgatgtcggcgatataggcgccagcaaccgcacctgtggcgccggtgatgccggccacgatgcgtccggcgtagaggatccgtcgacctgcaggggggggggggcgctgaggtctgcctcgtgaagaaggtgttgctgactcataccaggcctgaatcgccccatcatccagccagaaagtgagggagccacggttgatgagagctttgttgtaggtggaccagttggtgattttgaacttttgctttgccacggaacggtctgcgttgtcgggaagatgcgtgatctgatccttcaactcagcaaaagttcgatttattcaacaaagccgccgtcccgtcaagtcagcgtaatgctctgccagtgttacaaccaattaaccaattctgattagaaaaactcatcgagcatcaaatgaaactgcaatttattcatatcaggattatcaataccatatttttgaaaaagccgtttctgtaatgaaggagaaaactcaccgaggcagttccataggatggcaagatcctggtatcggtctgcgattccgactcgtccaacatcaatacaacctattaatttcccctcgtcaaaaataaggttatcaagtgagaaatcaccatgagtgacgactgaatccggtgagaatggcaaaagcttatgcatttctttccagacttgttcaacaggccagccattacgctcgtcatcaaaatcactcgcatcaaccaaaccgttattcattcgtgattgcgcctgagcgagacgaaatacgcgatcgctgttaaaaggacaattacaaacaggaatcgaatgcaaccggcgcaggaacactgccagcgcatcaacaatattttcacctgaatcaggatattcttctaatacctggaatgctgttttcccggggatcgcagtggtgagtaaccatgcatcatcaggagtacggataaaatgcttgatggtcggaagaggcataaattccgtcagccagtttagtctgaccatctcatctgtaacatcattggcaacgctacctttgccatgtttcagaaacaactctggcgcatcgggcttcccatacaatcgatagattgtcgcacctgattgcccgacattatcgcgagcccatttatacccatataaatcagcatccatgttggaatttaatcgcggcctcgagcaagacgtttcccgttgaatatggctcat

SEQ ID NO: 122 - DNA, 6704 bp, Artificial
  Synthetic
aacaccccttgtattactgtttatgtaagcagacagttttattgttcatgatgatatatttttatcttgtgcaatgtaacatcagagattttgagacacaacgtggctttccatcaaaaaaatattgacaacataaaaaactttgtgttatacttgtggaattgtgagcggataacaattctatatctgttattttttccaaccacagatctatgaaatttggaaactttttgcttacataccaacctccccaattttcccaaacagaggtaatgaaacgtttggttaaattaggtcgcatctctgaggagtgtggttttgataccgtatggttactggagcatcatttcacggagtttggtttgcttggtaacccttatgtcgctgctgcatatttacttggcgcgactaaaaaattgaatgtaggaactgccgctattgttcttcccacagcccatccagtacgccaacttgaagatgtgaatttattggatcaaatgtcaaaaggacgatttcggtttggtatttgccgagggctttacaacaaggactttcgcgtattcggaacagatatgaataacagtcgcgccttagcggaatgctggtacgggctgataaagaatggcatgacagagggatatatggaagctgataatgaacatatcaagttccataaggtaaaagtaaaccccgcggcgtatagcagaggtggcgcaccggtttatgtggtggctgaatcagcttcgacgactgagtgggctgctcaatttggcctaccgatgatattaagttggattataaatactaacgaaaagaaagcacaacttgagctttataatgaagtggctcaagaatatgggcacgatattcataatatcgaccattgcttatcatatataacatctgtagatcatgactcaattaaagcgaaagagatttgccggaaatttctggggcattggtatgattcttatgtgaatgctacgactatttttgatgattcagaccaaacaagaggttatgatttcaataaagggcagtggcgtgactttgtattaaaaggacataaagatactaatcgccgtattgattacagttacgaaatcaatcccgtgggaacgccgcaggaatgtattgacataattcaaaaagacattgatgctacaggaatatcaaatatttgttgtggatttgaagctaatggaacagtagacgaaattattgcttccatgaagctcttccagtctgatgtcatgccatttcttaaagaaaaacaacgttcgctattatattatggcggtggcggtagcggcggtggcggtagcggcggtggcggtagcggcggtggcggtagcaaatttggattgttcttccttaacttcatcaattcaacaactgttcaagaacagagtatagttcgcatgcaggaaataacggagtatgttgataagttgaattttgaacagattttagtgtatgaaaatcatttttcagataatggtgttgtcggcgctcctctgactgtttctggttttctgctcggtttaacagagaaaattaaaattggttcattaaatcacatcattacaactcatcatcctgtccgcatagcggaggaagcttgcttattggatcagttaagtgaagggagatttattttagggtttagtgattgcgaaaaaaaagatgaaatgcatttttttaatcgcccggttgaatatcaacagcaactatttgaagagtgttatgaaatcattaacgatgctttaacaacaggctattgtaatccagataacgatttttatagcttccctaaaatatctgtaaatccccatgcttatacgccaggcggacctcggaaatatgtaacagcaaccagtcatcatattgttgagtgggcggccaaaaaaggtattcctctcatctttaagtgggatgattctaatgatgttagatatgaatatgctgaaagatataaagccgttgcggataaatatgacgttgacctatcagagatagaccatcagttaatgatattagttaactataacgaagatagtaataaagctaaacaagagacgcgtgcatttattagtgattatgttcttgaaatgcaccctaatgaaaatttcgaaaataaacttgaagaaataattgcagaaaacgctgtcggaaattatacggagtgtataactgcggctaagttggcaattgaaaagtgtggtgcgaaaagtgtattgctgtcctttgaaccaatgaatgatttgatgagccaaaaaaatgtaatcaatattgttgatgataatattaagaagtaccacacggaatatacctaagtcgaccggctgctaacaaagcccgcggccgctgaagatcgatctcgacgagtgagagaagattttcagcctgatacagattaaatcagaacgcagaagcggtctgataaaacagaatttgcctggcggcagtagcgcggtggtcccacctgaccccatgccgaactcagaagtgaaacgccgtagcgccgatggtagtgtggggtcaccccatgcgagagtagggaactgccaggcatcaaataaaacgaaaggctcagtcgaaagactgggcctttcgttttatctgttgtttgtcggtgaacgctctcctgagtaggacaaatccgccgggagcggatttgaacgttgcgaagcaacggcccggagggtggcgggcaggacgcccgccataaactgccaggcatcaaattaagcagaaggccatcctgacggatggcctttttgcgtttctacagagcgtcagaccccttaataagatgatcttcttgagatcgttttggtctgcgcgtaatctcttgctctgaaaacgaaaaaaccgccttgcagggcggtttttcgaaggttctctgagctaccaactctttgaaccgaggtaactggcttggaggagcgcagtcaccaaaacttgtcctttcagtttagccttaaccggcgcatgacttcaagactaactcctctaaatcaattaccagtggctgctgccagtggtgcttttgcatgtctttccgggttggactcaagacgatagttaccggataaggcgcagcggtcggactgaacggggggttcgtgcatacagtccagcttggagcgaactgcctacccggaactgagtgtcaggcgtggaatgagacaaacgcggccataacagcggaatgacaccggtaaaccgaaaggcaggaacaggagagcgcacgagggagccgccagggggaaacgcctggtatctttatagtcctgtcgggtttcgccaccactgatttgagcgtcagatttcgtgatgcttgtcaggggggcggagcctatggaaaaacggctttgccgcggccctctcggatctgtatggtgcactctcagtacaatctgctctgatgccgcatagttaagccagtatacactccgctatcgctacgtgactgcctcgacctgcagcaattccaacgccatcaaaaataattcgcgtctggccttcctgtagccagctttcatcaacattaaatgtgagcgagtaacaacccgtcggattctccgtgggaacaaacggcggattgaccgtaatgggataggtcacgttggtgtagatgggcgcatcgtaaccgtgcatctgccagtttgaggggacgacgacagtatcggcctcaggaagatcgcactccagccagctttccggcaccgcttctggtgccggaaaccaggcaaagcgccattcgccattcaggctgcgcaactgttgggaagggcgatcggtgcgggcctcttcgctattacgccagctggcgaaagggggatgtgctgcaaggcgattaagttgggtaacgccagggttttcccagtcacgacgttgtaaaacgacggccagtgaatccgtaatcatggtcatagctgtttcctgtgtgaaattgttatccgctcacaattccacacaacatacgagccggaagcataaagtgtaaagcctggggtgcctaatgagtgagctaacttacattaattgcgttgcgctcactgcccgctttccagtcgggaaacctgtcgtgccagctgcattaatgaatcggccaacgcgcggggagaggcggtttgcgtattgggcgccagggtggtttttcttttcaccagtgagacgggcaacagctgattgcccttcaccgcctggccctgagagagttgcagcaagcggtccacgctggtttgccccagcaggcgaaaatcctgtttgatggtggttaacggcgggatataacatgagctgtcttcggtatcgtcgtatcccactaccgagatatccgcaccaacgcgcagcccggactcggtaatggcgcgcattgcgcccagcgccatctgatcgttggcaaccagcatcgcagtgggaacgatgccctcattcagcatttgcatggtttgttgaaaaccggacatggcactccagtcgccttcccgttccgctatcggctgaatttgattgcgagtgagatatttatgccagccagccagacgcagacgcgccgagacagaacttaatgggcccgctaacagcgcgatttgctggtgacccaatgcgaccagatgctccacgcccagtcgcgtaccgtcttcatgggagaaaataatactgttgatgggtgtctggtcagagacatcaagaaataacgccggaacattagtgcaggcagcttccacagcaatggcatcctggtcatccagcggatagttaatgatcagcccactgacgcgttgcgcgagaagattgtgcaccgccgctttacaggcttcgacgccgcttcgttctaccatcgacaccaccacgctggcacccagttgatcggcgcgagatttaatcgccgcgacaatttgcgacggcgcgtgcagggccagactggaggtggcaacgccaatcagcaacgactgtttgcccgccagttgttgtgccacgcggttgggaatgtaattcagctccgccatcgccgcttccactttttcccgcgttttcgcagaaacgtggctggcctggttcaccacgcgggaaacggtctgataagagacaccggcatactctgcgacatcgtataacgttactggtttcacattcaccaccctgaattgactctcttccgggcgctatcatgccataccgcgaaaggttttgcaccattccatggtgtcggaattgctgcaggtcgagggggtcatggctgcgccccgacacccgccaacacccgctgacgcgccctgacgggcttgtctgctcccggcatccgcttacagacaagctgtgaccgtctccgggagctgcatgtgtcagaggttttcaccgtcatcaccgaaacgcgcgaggcaggatggcgcccaacagtcccccggccacggggcctgccaccatacccacgccgaaacaagcgctcatgagcccgaagtggcgagcccgatcttccccatcggtgatgtcggcgatataggcgccagcaaccgcacctgtggcgccggtgatgccggccacgatgcgtccggcgtagaggatccgtcgacctgcaggggggggggggcgctgaggtctgcctcgtgaagaaggtgttgctgactcataccaggcctgaatcgccccatcatccagccagaaagtgagggagccacggttgatgagagctttgttgtaggtggaccagttggtgattttgaacttttgctttgccacggaacggtctgcgttgtcgggaagatgcgtgatctgatccttcaactcagcaaaagttcgatttattcaacaaagccgccgtcccgtcaagtcagcgtaatgctctgccagtgttacaaccaattaaccaattctgattagaaaaactcatcgagcatcaaatgaaactgcaatttattcatatcaggattatcaataccatatttttgaaaaagccgtttctgtaatgaaggagaaaactcaccgaggcagttccataggatggcaagatcctggtatcggtctgcgattccgactcgtccaacatcaatacaacctattaatttcccctcgtcaaaaataaggttatcaagtgagaaatcaccatgagtgacgactgaatccggtgagaatggcaaaagcttatgcatttctttccagacttgttcaacaggccagccattacgctcgtcatcaaaatcactcgcatcaaccaaaccgttattcattcgtgattgcgcctgagcgagacgaaatacgcgatcgctgttaaaaggacaattacaaacaggaatcgaatgcaaccggcgcaggaacactgccagcgcatcaacaatattttcacctgaatcaggatattcttctaatacctggaatgctgttttcccggggatcgcagtggtgagtaaccatgcatcatcaggagtacggataaaatgcttgatggtcggaagaggcataaattccgtcagccagtttagtctgaccatctcatctgtaacatcattggcaacgctacctttgccatgtttcagaaacaactctggcgcatcgggcttcccatacaatcgatagattgtcgcacctgattgcccgacattatcgcgagcccatttatacccatataaatcagcatccatgttggaatttaatcgcggcctcgagcaagacgtttcccgttgaatatggctcat

SEQ ID NO: 123 - DNA, 5300 bp, Artificial
  Synthetic
aacaccccttgtattactgtttatgtaagcagacagttttattgttcatgatgatatatttttatcttgtgcaatgtaacatcagagattttgagacacaacgtggctttccatcaaaaaaatattgacaacataaaaaactttgtgttatacttgtggaattgtgagcggataacaattctatatctgttattttttccaaccacagatctatggtcagtaaaggagaagaacttttcactggagttgtcccaattcttgttgaattagatggtgatgttaatgggcacaaattttctgtcagtggagagggtgaaggtgatgcaacatacggaaaacttacccttaaactgatttgcactactggaaaactacctgttccatggccaacacttgtcactactctgggctatggtctgcaatgctttgccagatacccagatcatatgaaacagcatgactttttcaagagtgccatgcccgaaggttatgtacaggaaagaactatatttttcaaagatgacgggaactacaagacacgtgctgaagtcaagtttgaaggtgatacccttgttaatagaatcgagttaaaaggtattgattttaaagaagatggaaacattcttggacacaaattggaatacaactataactcacacaatgtatacatcaccgcagacaaacaaaagaatggaatcaaagccaacttcaaaattagacacaacattgaagatggaggcgttcaactagcagaccattatcaacaaaatactccaattggcgatggccctgtccttttaccagacaaccattacctgtcctaccaatctgccctttcgaaagatcccaacgaaaagagagaccacatggtccttcttgagtttgtaacagctgctgggattacacatggcatggatgaactatacaaataagtcgaccggctgctaacaaagcccgcggccgctgaagatcgatctcgacgagtgagagaagattttcagcctgatacagattaaatcagaacgcagaagcggtctgataaaacagaatttgcctggcggcagtagcgcggtggtcccacctgaccccatgccgaactcagaagtgaaacgccgtagcgccgatggtagtgtggggtcaccccatgcgagagtagggaactgccaggcatcaaataaaacgaaaggctcagtcgaaagactgggcctttcgttttatctgttgtttgtcggtgaacgctctcctgagtaggacaaatccgccgggagcggatttgaacgttgcgaagcaacggcccggagggtggcgggcaggacgcccgccataaactgccaggcatcaaattaagcagaaggccatcctgacggatggcctttttgcgtttctacagagcgtcagaccccttaataagatgatcttcttgagatcgttttggtctgcgcgtaatctcttgctctgaaaacgaaaaaaccgccttgcagggcggtttttcgaaggttctctgagctaccaactctttgaaccgaggtaactggcttggaggagcgcagtcaccaaaacttgtcctttcagtttagccttaaccggcgcatgacttcaagactaactcctctaaatcaattaccagtggctgctgccagtggtgcttttgcatgtctttccgggttggactcaagacgatagttaccggataaggcgcagcggtcggactgaacggggggttcgtgcatacagtccagcttggagcgaactgcctacccggaactgagtgtcaggcgtggaatgagacaaacgcggccataacagcggaatgacaccggtaaaccgaaaggcaggaacaggagagcgcacgagggagccgccagggggaaacgcctggtatctttatagtcctgtcgggtttcgccaccactgatttgagcgtcagatttcgtgatgcttgtcaggggggcggagcctatggaaaaacggctttgccgcggccctctcggatctgtatggtgcactctcagtacaatctgctctgatgccgcatagttaagccagtatacactccgctatcgctacgtgactgcctcgacctgcagcaattccaacgccatcaaaaataattcgcgtctggccttcctgtagccagctttcatcaacattaaatgtgagcgagtaacaacccgtcggattctccgtgggaacaaacggcggattgaccgtaatgggataggtcacgttggtgtagatgggcgcatcgtaaccgtgcatctgccagtttgaggggacgacgacagtatcggcctcaggaagatcgcactccagccagctttccggcaccgcttctggtgccggaaaccaggcaaagcgccattcgccattcaggctgcgcaactgttgggaagggcgatcggtgcgggcctcttcgctattacgccagctggcgaaagggggatgtgctgcaaggcgattaagttgggtaacgccagggttttcccagtcacgacgttgtaaaacgacggccagtgaatccgtaatcatggtcatagctgtttcctgtgtgaaattgttatccgctcacaattccacacaacatacgagccggaagcataaagtgtaaagcctggggtgcctaatgagtgagctaacttacattaattgcgttgcgctcactgcccgctttccagtcgggaaacctgtcgtgccagctgcattaatgaatcggccaacgcgcggggagaggcggtttgcgtattgggcgccagggtggtttttcttttcaccagtgagacgggcaacagctgattgcccttcaccgcctggccctgagagagttgcagcaagcggtccacgctggtttgccccagcaggcgaaaatcctgtttgatggtggttaacggcgggatataacatgagctgtcttcggtatcgtcgtatcccactaccgagatatccgcaccaacgcgcagcccggactcggtaatggcgcgcattgcgcccagcgccatctgatcgttggcaaccagcatcgcagtgggaacgatgccctcattcagcatttgcatggtttgttgaaaaccggacatggcactccagtcgccttcccgttccgctatcggctgaatttgattgcgagtgagatatttatgccagccagccagacgcagacgcgccgagacagaacttaatgggcccgctaacagcgcgatttgctggtgacccaatgcgaccagatgctccacgcccagtcgcgtaccgtcttcatgggagaaaataatactgttgatgggtgtctggtcagagacatcaagaaataacgccggaacattagtgcaggcagcttccacagcaatggcatcctggtcatccagcggatagttaatgatcagcccactgacgcgttgcgcgagaagattgtgcaccgccgctttacaggcttcgacgccgcttcgttctaccatcgacaccaccacgctggcacccagttgatcggcgcgagatttaatcgccgcgacaatttgcgacggcgcgtgcagggccagactggaggtggcaacgccaatcagcaacgactgtttgcccgccagttgttgtgccacgcggttgggaatgtaattcagctccgccatcgccgcttccactttttcccgcgttttcgcagaaacgtggctggcctggttcaccacgcgggaaacggtctgataagagacaccggcatactctgcgacatcgtataacgttactggtttcacattcaccaccctgaattgactctcttccgggcgctatcatgccataccgcgaaaggttttgcaccattccatggtgtcggaattgctgcaggtcgagggggtcatggctgcgccccgacacccgccaacacccgctgacgcgccctgacgggcttgtctgctcccggcatccgcttacagacaagctgtgaccgtctccgggagctgcatgtgtcagaggttttcaccgtcatcaccgaaacgcgcgaggcaggatggcgcccaacagtcccccggccacggggcctgccaccatacccacgccgaaacaagcgctcatgagcccgaagtggcgagcccgatcttccccatcggtgatgtcggcgatataggcgccagcaaccgcacctgtggcgccggtgatgccggccacgatgcgtccggcgtagaggatccgtcgacctgcaggggggggggggcgctgaggtctgcctcgtgaagaaggtgttgctgactcataccaggcctgaatcgccccatcatccagccagaaagtgagggagccacggttgatgagagctttgttgtaggtggaccagttggtgattttgaacttttgctttgccacggaacggtctgcgttgtcgggaagatgcgtgatctgatccttcaactcagcaaaagttcgatttattcaacaaagccgccgtcccgtcaagtcagcgtaatgctctgccagtgttacaaccaattaaccaattctgattagaaaaactcatcgagcatcaaatgaaactgcaatttattcatatcaggattatcaataccatatttttgaaaaagccgtttctgtaatgaaggagaaaactcaccgaggcagttccataggatggcaagatcctggtatcggtctgcgattccgactcgtccaacatcaatacaacctattaatttcccctcgtcaaaaataaggttatcaagtgagaaatcaccatgagtgacgactgaatccggtgagaatggcaaaagcttatgcatttctttccagacttgttcaacaggccagccattacgctcgtcatcaaaatcactcgcatcaaccaaaccgttattcattcgtgattgcgcctgagcgagacgaaatacgcgatcgctgttaaaaggacaattacaaacaggaatcgaatgcaaccggcgcaggaacactgccagcgcatcaacaatattttcacctgaatcaggatattcttctaatacctggaatgctgttttcccggggatcgcagtggtgagtaaccatgcatcatcaggagtacggataaaatgcttgatggtcggaagaggcataaattccgtcagccagtttagtctgaccatctcatctgtaacatcattggcaacgctacctttgccatgtttcagaaacaactctggcgcatcgggcttcccatacaatcgatagattgtcgcacctgattgcccgacattatcgcgagcccatttatacccatataaatcagcatccatgttggaatttaatcgcggcctcgagcaagacgtttcccgttgaatatggctcat

SEQ ID NO: 124 - DNA, 5291 bp, Artificial
  Synthetic
aacaccccttgtattactgtttatgtaagcagacagttttattgttcatgatgatatatttttatcttgtgcaatgtaacatcagagattttgagacacaacgtggctttccatcaaaaaaatattgacaacataaaaaactttgtgttatacttgtggaattgtgagcggataacaattctatatctgttattttttccaaccacagatctatgagcagcaagggcgaggaggataacatggccatcatcaaggagttcatgcgcttcaaggtgcacatggagggctccgtgaacggccacgagttcgagatcgagggcgagggcgagggccgcccctacgagggcacccagaccgccaagctgaaggtgaccaagggcggccccctgcccttcgcctgggacatcctgtcccctcagttcatgtacggctccaaggcctacgtgaagcaccccgccgacatccccgactacttgaagctgtccttccccgagggcttcaagtgggagcgcgtgatgaacttcgaggacggcggcgtggtgaccgtgacccaggactcctccctacaggacggcgagttcatctacaaggtgaagctgcgcggcaccaacttcccctccgacggccccgtaatgcagaagaagaccatgggctgggaggcctcctccgagcggatgtaccccgaggacggcgccctgaagggcgagatcaagcagaggctgaagctgaaggacggcggccactacgacgccgaggtcaagaccacctacaaggccaagaagcccgtgcagctgcccggcgcctacaacgtcaacatcaagctggacatcacctcccacaacgaggactacaccatcgtggaacagtacgagcgcgccgagggccgccactccaccggcggcatggacgagctgtacaagtaagtcgaccggctgctaacaaagcccgcggccgctgaagatcgatctcgacgagtgagagaagattttcagcctgatacagattaaatcagaacgcagaagcggtctgataaaacagaatttgcctggcggcagtagcgcggtggtcccacctgaccccatgccgaactcagaagtgaaacgccgtagcgccgatggtagtgtggggtcaccccatgcgagagtagggaactgccaggcatcaaataaaacgaaaggctcagtcgaaagactgggcctttcgttttatctgttgtttgtcggtgaacgctctcctgagtaggacaaatccgccgggagcggatttgaacgttgcgaagcaacggcccggagggtggcgggcaggacgcccgccataaactgccaggcatcaaattaagcagaaggccatcctgacggatggcctttttgcgtttctacagagcgtcagaccccttaataagatgatcttcttgagatcgttttggtctgcgcgtaatctcttgctctgaaaacgaaaaaaccgccttgcagggcggtttttcgaaggttctctgagctaccaactctttgaaccgaggtaactggcttggaggagcgcagtcaccaaaacttgtcctttcagtttagccttaaccggcgcatgacttcaagactaactcctctaaatcaattaccagtggctgctgccagtggtgcttttgcatgtctttccgggttggactcaagacgatagttaccggataaggcgcagcggtcggactgaacggggggttcgtgcatacagtccagcttggagcgaactgcctacccggaactgagtgtcaggcgtggaatgagacaaacgcggccataacagcggaatgacaccggtaaaccgaaaggcaggaacaggagagcgcacgagggagccgccagggggaaacgcctggtatctttatagtcctgtcgggtttcgccaccactgatttgagcgtcagatttcgtgatgcttgtcaggggggcggagcctatggaaaaacggctttgccgcggccctctcggatctgtatggtgcactctcagtacaatctgctctgatgccgcatagttaagccagtatacactccgctatcgctacgtgactgcctcgacctgcagcaattccaacgccatcaaaaataattcgcgtctggccttcctgtagccagctttcatcaacattaaatgtgagcgagtaacaacccgtcggattctccgtgggaacaaacggcggattgaccgtaatgggataggtcacgttggtgtagatgggcgcatcgtaaccgtgcatctgccagtttgaggggacgacgacagtatcggcctcaggaagatcgcactccagccagctttccggcaccgcttctggtgccggaaaccaggcaaagcgccattcgccattcaggctgcgcaactgttgggaagggcgatcggtgcgggcctcttcgctattacgccagctggcgaaagggggatgtgctgcaaggcgattaagttgggtaacgccagggttttcccagtcacgacgttgtaaaacgacggccagtgaatccgtaatcatggtcatagctgtttcctgtgtgaaattgttatccgctcacaattccacacaacatacgagccggaagcataaagtgtaaagcctggggtgcctaatgagtgagctaacttacattaattgcgttgcgctcactgcccgctttccagtcgggaaacctgtcgtgccagctgcattaatgaatcggccaacgcgcggggagaggcggtttgcgtattgggcgccagggtggtttttcttttcaccagtgagacgggcaacagctgattgcccttcaccgcctggccctgagagagttgcagcaagcggtccacgctggtttgccccagcaggcgaaaatcctgtttgatggtggttaacggcgggatataacatgagctgtcttcggtatcgtcgtatcccactaccgagatatccgcaccaacgcgcagcccggactcggtaatggcgcgcattgcgcccagcgccatctgatcgttggcaaccagcatcgcagtgggaacgatgccctcattcagcatttgcatggtttgttgaaaaccggacatggcactccagtcgccttcccgttccgctatcggctgaatttgattgcgagtgagatatttatgccagccagccagacgcagacgcgccgagacagaacttaatgggcccgctaacagcgcgatttgctggtgacccaatgcgaccagatgctccacgcccagtcgcgtaccgtcttcatgggagaaaataatactgttgatgggtgtctggtcagagacatcaagaaataacgccggaacattagtgcaggcagcttccacagcaatggcatcctggtcatccagcggatagttaatgatcagcccactgacgcgttgcgcgagaagattgtgcaccgccgctttacaggcttcgacgccgcttcgttctaccatcgacaccaccacgctggcacccagttgatcggcgcgagatttaatcgccgcgacaatttgcgacggcgcgtgcagggccagactggaggtggcaacgccaatcagcaacgactgtttgcccgccagttgttgtgccacgcggttgggaatgtaattcagctccgccatcgccgcttccactttttcccgcgttttcgcagaaacgtggctggcctggttcaccacgcgggaaacggtctgataagagacaccggcatactctgcgacatcgtataacgttactggtttcacattcaccaccctgaattgactctcttccgggcgctatcatgccataccgcgaaaggttttgcaccattccatggtgtcggaattgctgcaggtcgagggggtcatggctgcgccccgacacccgccaacacccgctgacgcgccctgacgggcttgtctgctcccggcatccgcttacagacaagctgtgaccgtctccgggagctgcatgtgtcagaggttttcaccgtcatcaccgaaacgcgcgaggcaggatggcgcccaacagtcccccggccacggggcctgccaccatacccacgccgaaacaagcgctcatgagcccgaagtggcgagcccgatcttccccatcggtgatgtcggcgatataggcgccagcaaccgcacctgtggcgccggtgatgccggccacgatgcgtccggcgtagaggatccgtcgacctgcaggggggggggggcgctgaggtctgcctcgtgaagaaggtgttgctgactcataccaggcctgaatcgccccatcatccagccagaaagtgagggagccacggttgatgagagctttgttgtaggtggaccagttggtgattttgaacttttgctttgccacggaacggtctgcgttgtcgggaagatgcgtgatctgatccttcaactcagcaaaagttcgatttattcaacaaagccgccgtcccgtcaagtcagcgtaatgctctgccagtgttacaaccaattaaccaattctgattagaaaaactcatcgagcatcaaatgaaactgcaatttattcatatcaggattatcaataccatatttttgaaaaagccgtttctgtaatgaaggagaaaactcaccgaggcagttccataggatggcaagatcctggtatcggtctgcgattccgactcgtccaacatcaatacaacctattaatttcccctcgtcaaaaataaggttatcaagtgagaaatcaccatgagtgacgactgaatccggtgagaatggcaaaagcttatgcatttctttccagacttgttcaacaggccagccattacgctcgtcatcaaaatcactcgcatcaaccaaaccgttattcattcgtgattgcgcctgagcgagacgaaatacgcgatcgctgttaaaaggacaattacaaacaggaatcgaatgcaaccggcgcaggaacactgccagcgcatcaacaatattttcacctgaatcaggatattcttctaatacctggaatgctgttttcccggggatcgcagtggtgagtaaccatgcatcatcaggagtacggataaaatgcttgatggtcggaagaggcataaattccgtcagccagtttagtctgaccatctcatctgtaacatcattggcaacgctacctttgccatgtttcagaaacaactctggcgcatcgggcttcccatacaatcgatagattgtcgcacctgattgcccgacattatcgcgagcccatttatacccatataaatcagcatccatgttggaatttaatcgcggcctcgagcaagacgtttcccgttgaatatggctcat

SEQ ID NO: 125 - DNA, 5291 bp, Artificial
  Synthetic
aacaccccttgtattactgtttatgtaagcagacagttttattgttcatgatgatatatttttatcttgtgcaatgtaacatcagagattttgagacacaacgtggctttccatcaaaaaaatattgacaacataaaaaactttgtgttatacttgtggaattgtgagcggataacaattctatatctgttattttttccaaccacagatctatgagcaaaaagggcgaggaggataacatggccatcatcaaggagttcatgcgcttcaaggtgcacatggagggctccgtgaacggccacgagttcgagatcgagggcgagggcgagggccgcccctacgagggcacccagaccgccaagctgaaggtgaccaagggcggccccctgcccttcgcctgggacatcctgtcccctcagttcatgtacggctccaaggcctacgtgaagcaccccgccgacatccccgactacttgaagctgtccttccccgagggcttcaagtgggagcgcgtgatgaacttcgaggacggcggcgtggtgaccgtgacccaggactcctccctacaggacggcgagttcatctacaaggtgaagctgcgcggcaccaacttcccctccgacggccccgtaatgcagaagaagaccatgggctgggaggcctcctccgagcggatgtaccccgaggacggcgccctgaagggcgagatcaagcagaggctgaagctgaaggacggcggccactacgacgccgaggtcaagaccacctacaaggccaagaagcccgtgcagctgcccggcgcctacaacgtcaacatcaagctggacatcacctcccacaacgaggactacaccatcgtggaacagtacgagcgcgccgagggccgccactccaccggcggcatggacgagctgtacaagtaagtcgaccggctgctaacaaagcccgcggccgctgaagatcgatctcgacgagtgagagaagattttcagcctgatacagattaaatcagaacgcagaagcggtctgataaaacagaatttgcctggcggcagtagcgcggtggtcccacctgaccccatgccgaactcagaagtgaaacgccgtagcgccgatggtagtgtggggtcaccccatgcgagagtagggaactgccaggcatcaaataaaacgaaaggctcagtcgaaagactgggcctttcgttttatctgttgtttgtcggtgaacgctctcctgagtaggacaaatccgccgggagcggatttgaacgttgcgaagcaacggcccggagggtggcgggcaggacgcccgccataaactgccaggcatcaaattaagcagaaggccatcctgacggatggcctttttgcgtttctacagagcgtcagaccccttaataagatgatcttcttgagatcgttttggtctgcgcgtaatctcttgctctgaaaacgaaaaaaccgccttgcagggcggtttttcgaaggttctctgagctaccaactctttgaaccgaggtaactggcttggaggagcgcagtcaccaaaacttgtcctttcagtttagccttaaccggcgcatgacttcaagactaactcctctaaatcaattaccagtggctgctgccagtggtgcttttgcatgtctttccgggttggactcaagacgatagttaccggataaggcgcagcggtcggactgaacggggggttcgtgcatacagtccagcttggagcgaactgcctacccggaactgagtgtcaggcgtggaatgagacaaacgcggccataacagcggaatgacaccggtaaaccgaaaggcaggaacaggagagcgcacgagggagccgccagggggaaacgcctggtatctttatagtcctgtcgggtttcgccaccactgatttgagcgtcagatttcgtgatgcttgtcaggggggcggagcctatggaaaaacggctttgccgcggccctctcggatctgtatggtgcactctcagtacaatctgctctgatgccgcatagttaagccagtatacactccgctatcgctacgtgactgcctcgacctgcagcaattccaacgccatcaaaaataattcgcgtctggccttcctgtagccagctttcatcaacattaaatgtgagcgagtaacaacccgtcggattctccgtgggaacaaacggcggattgaccgtaatgggataggtcacgttggtgtagatgggcgcatcgtaaccgtgcatctgccagtttgaggggacgacgacagtatcggcctcaggaagatcgcactccagccagctttccggcaccgcttctggtgccggaaaccaggcaaagcgccattcgccattcaggctgcgcaactgttgggaagggcgatcggtgcgggcctcttcgctattacgccagctggcgaaagggggatgtgctgcaaggcgattaagttgggtaacgccagggttttcccagtcacgacgttgtaaaacgacggccagtgaatccgtaatcatggtcatagctgtttcctgtgtgaaattgttatccgctcacaattccacacaacatacgagccggaagcataaagtgtaaagcctggggtgcctaatgagtgagctaacttacattaattgcgttgcgctcactgcccgctttccagtcgggaaacctgtcgtgccagctgcattaatgaatcggccaacgcgcggggagaggcggtttgcgtattgggcgccagggtggtttttcttttcaccagtgagacgggcaacagctgattgcccttcaccgcctggccctgagagagttgcagcaagcggtccacgctggtttgccccagcaggcgaaaatcctgtttgatggtggttaacggcgggatataacatgagctgtcttcggtatcgtcgtatcccactaccgagatatccgcaccaacgcgcagcccggactcggtaatggcgcgcattgcgcccagcgccatctgatcgttggcaaccagcatcgcagtgggaacgatgccctcattcagcatttgcatggtttgttgaaaaccggacatggcactccagtcgccttcccgttccgctatcggctgaatttgattgcgagtgagatatttatgccagccagccagacgcagacgcgccgagacagaacttaatgggcccgctaacagcgcgatttgctggtgacccaatgcgaccagatgctccacgcccagtcgcgtaccgtcttcatgggagaaaataatactgttgatgggtgtctggtcagagacatcaagaaataacgccggaacattagtgcaggcagcttccacagcaatggcatcctggtcatccagcggatagttaatgatcagcccactgacgcgttgcgcgagaagattgtgcaccgccgctttacaggcttcgacgccgcttcgttctaccatcgacaccaccacgctggcacccagttgatcggcgcgagatttaatcgccgcgacaatttgcgacggcgcgtgcagggccagactggaggtggcaacgccaatcagcaacgactgtttgcccgccagttgttgtgccacgcggttgggaatgtaattcagctccgccatcgccgcttccactttttcccgcgttttcgcagaaacgtggctggcctggttcaccacgcgggaaacggtctgataagagacaccggcatactctgcgacatcgtataacgttactggtttcacattcaccaccctgaattgactctcttccgggcgctatcatgccataccgcgaaaggttttgcaccattccatggtgtcggaattgctgcaggtcgagggggtcatggctgcgccccgacacccgccaacacccgctgacgcgccctgacgggcttgtctgctcccggcatccgcttacagacaagctgtgaccgtctccgggagctgcatgtgtcagaggttttcaccgtcatcaccgaaacgcgcgaggcaggatggcgcccaacagtcccccggccacggggcctgccaccatacccacgccgaaacaagcgctcatgagcccgaagtggcgagcccgatcttccccatcggtgatgtcggcgatataggcgccagcaaccgcacctgtggcgccggtgatgccggccacgatgcgtccggcgtagaggatccgtcgacctgcaggggggggggggcgctgaggtctgcctcgtgaagaaggtgttgctgactcataccaggcctgaatcgccccatcatccagccagaaagtgagggagccacggttgatgagagctttgttgtaggtggaccagttggtgattttgaacttttgctttgccacggaacggtctgcgttgtcgggaagatgcgtgatctgatccttcaactcagcaaaagttcgatttattcaacaaagccgccgtcccgtcaagtcagcgtaatgctctgccagtgttacaaccaattaaccaattctgattagaaaaactcatcgagcatcaaatgaaactgcaatttattcatatcaggattatcaataccatatttttgaaaaagccgtttctgtaatgaaggagaaaactcaccgaggcagttccataggatggcaagatcctggtatcggtctgcgattccgactcgtccaacatcaatacaacctattaatttcccctcgtcaaaaataaggttatcaagtgagaaatcaccatgagtgacgactgaatccggtgagaatggcaaaagcttatgcatttctttccagacttgttcaacaggccagccattacgctcgtcatcaaaatcactcgcatcaaccaaaccgttattcattcgtgattgcgcctgagcgagacgaaatacgcgatcgctgttaaaaggacaattacaaacaggaatcgaatgcaaccggcgcaggaacactgccagcgcatcaacaatattttcacctgaatcaggatattcttctaatacctggaatgctgttttcccggggatcgcagtggtgagtaaccatgcatcatcaggagtacggataaaatgcttgatggtcggaagaggcataaattccgtcagccagtttagtctgaccatctcatctgtaacatcattggcaacgctacctttgccatgtttcagaaacaactctggcgcatcgggcttcccatacaatcgatagattgtcgcacctgattgcccgacattatcgcgagcccatttatacccatataaatcagcatccatgttggaatttaatcgcggcctcgagcaagacgtttcccgttgaatatggctcat

SEQ ID NO: 126 - DNA, 5291 bp, Artificial
  Synthetic
aacaccccttgtattactgtttatgtaagcagacagttttattgttcatgatgatatatttttatcttgtgcaatgtaacatcagagattttgagacacaacgtggctttccatcaaaaaaatattgacaacataaaaaactttgtgttatacttgtggaattgtgagcggataacaattctatatctgttattttttccaaccacagatctatgagcaaaggtggcgaggaggataacatggccatcatcaaggagttcatgcgcttcaaggtgcacatggagggctccgtgaacggccacgagttcgagatcgagggcgagggcgagggccgcccctacgagggcacccagaccgccaagctgaaggtgaccaagggcggccccctgcccttcgcctgggacatcctgtcccctcagttcatgtacggctccaaggcctacgtgaagcaccccgccgacatccccgactacttgaagctgtccttccccgagggcttcaagtgggagcgcgtgatgaacttcgaggacggcggcgtggtgaccgtgacccaggactcctccctacaggacggcgagttcatctacaaggtgaagctgcgcggcaccaacttcccctccgacggccccgtaatgcagaagaagaccatgggctgggaggcctcctccgagcggatgtaccccgaggacggcgccctgaagggcgagatcaagcagaggctgaagctgaaggacggcggccactacgacgccgaggtcaagaccacctacaaggccaagaagcccgtgcagctgcccggcgcctacaacgtcaacatcaagctggacatcacctcccacaacgaggactacaccatcgtggaacagtacgagcgcgccgagggccgccactccaccggcggcatggacgagctgtacaagtaagtcgaccggctgctaacaaagcccgcggccgctgaagatcgatctcgacgagtgagagaagattttcagcctgatacagattaaatcagaacgcagaagcggtctgataaaacagaatttgcctggcggcagtagcgcggtggtcccacctgaccccatgccgaactcagaagtgaaacgccgtagcgccgatggtagtgtggggtcaccccatgcgagagtagggaactgccaggcatcaaataaaacgaaaggctcagtcgaaagactgggcctttcgttttatctgttgtttgtcggtgaacgctctcctgagtaggacaaatccgccgggagcggatttgaacgttgcgaagcaacggcccggagggtggcgggcaggacgcccgccataaactgccaggcatcaaattaagcagaaggccatcctgacggatggcctttttgcgtttctacagagcgtcagaccccttaataagatgatcttcttgagatcgttttggtctgcgcgtaatctcttgctctgaaaacgaaaaaaccgccttgcagggcggtttttcgaaggttctctgagctaccaactctttgaaccgaggtaactggcttggaggagcgcagtcaccaaaacttgtcctttcagtttagccttaaccggcgcatgacttcaagactaactcctctaaatcaattaccagtggctgctgccagtggtgcttttgcatgtctttccgggttggactcaagacgatagttaccggataaggcgcagcggtcggactgaacggggggttcgtgcatacagtccagcttggagcgaactgcctacccggaactgagtgtcaggcgtggaatgagacaaacgcggccataacagcggaatgacaccggtaaaccgaaaggcaggaacaggagagcgcacgagggagccgccagggggaaacgcctggtatctttatagtcctgtcgggtttcgccaccactgatttgagcgtcagatttcgtgatgcttgtcaggggggcggagcctatggaaaaacggctttgccgcggccctctcggatctgtatggtgcactctcagtacaatctgctctgatgccgcatagttaagccagtatacactccgctatcgctacgtgactgcctcgacctgcagcaattccaacgccatcaaaaataattcgcgtctggccttcctgtagccagctttcatcaacattaaatgtgagcgagtaacaacccgtcggattctccgtgggaacaaacggcggattgaccgtaatgggataggtcacgttggtgtagatgggcgcatcgtaaccgtgcatctgccagtttgaggggacgacgacagtatcggcctcaggaagatcgcactccagccagctttccggcaccgcttctggtgccggaaaccaggcaaagcgccattcgccattcaggctgcgcaactgttgggaagggcgatcggtgcgggcctcttcgctattacgccagctggcgaaagggggatgtgctgcaaggcgattaagttgggtaacgccagggttttcccagtcacgacgttgtaaaacgacggccagtgaatccgtaatcatggtcatagctgtttcctgtgtgaaattgttatccgctcacaattccacacaacatacgagccggaagcataaagtgtaaagcctggggtgcctaatgagtgagctaacttacattaattgcgttgcgctcactgcccgctttccagtcgggaaacctgtcgtgccagctgcattaatgaatcggccaacgcgcggggagaggcggtttgcgtattgggcgccagggtggtttttcttttcaccagtgagacgggcaacagctgattgcccttcaccgcctggccctgagagagttgcagcaagcggtccacgctggtttgccccagcaggcgaaaatcctgtttgatggtggttaacggcgggatataacatgagctgtcttcggtatcgtcgtatcccactaccgagatatccgcaccaacgcgcagcccggactcggtaatggcgcgcattgcgcccagcgccatctgatcgttggcaaccagcatcgcagtgggaacgatgccctcattcagcatttgcatggtttgttgaaaaccggacatggcactccagtcgccttcccgttccgctatcggctgaatttgattgcgagtgagatatttatgccagccagccagacgcagacgcgccgagacagaacttaatgggcccgctaacagcgcgatttgctggtgacccaatgcgaccagatgctccacgcccagtcgcgtaccgtcttcatgggagaaaataatactgttgatgggtgtctggtcagagacatcaagaaataacgccggaacattagtgcaggcagcttccacagcaatggcatcctggtcatccagcggatagttaatgatcagcccactgacgcgttgcgcgagaagattgtgcaccgccgctttacaggcttcgacgccgcttcgttctaccatcgacaccaccacgctggcacccagttgatcggcgcgagatttaatcgccgcgacaatttgcgacggcgcgtgcagggccagactggaggtggcaacgccaatcagcaacgactgtttgcccgccagttgttgtgccacgcggttgggaatgtaattcagctccgccatcgccgcttccactttttcccgcgttttcgcagaaacgtggctggcctggttcaccacgcgggaaacggtctgataagagacaccggcatactctgcgacatcgtataacgttactggtttcacattcaccaccctgaattgactctcttccgggcgctatcatgccataccgcgaaaggttttgcaccattccatggtgtcggaattgctgcaggtcgagggggtcatggctgcgccccgacacccgccaacacccgctgacgcgccctgacgggcttgtctgctcccggcatccgcttacagacaagctgtgaccgtctccgggagctgcatgtgtcagaggttttcaccgtcatcaccgaaacgcgcgaggcaggatggcgcccaacagtcccccggccacggggcctgccaccatacccacgccgaaacaagcgctcatgagcccgaagtggcgagcccgatcttccccatcggtgatgtcggcgatataggcgccagcaaccgcacctgtggcgccggtgatgccggccacgatgcgtccggcgtagaggatccgtcgacctgcaggggggggggggcgctgaggtctgcctcgtgaagaaggtgttgctgactcataccaggcctgaatcgccccatcatccagccagaaagtgagggagccacggttgatgagagctttgttgtaggtggaccagttggtgattttgaacttttgctttgccacggaacggtctgcgttgtcgggaagatgcgtgatctgatccttcaactcagcaaaagttcgatttattcaacaaagccgccgtcccgtcaagtcagcgtaatgctctgccagtgttacaaccaattaaccaattctgattagaaaaactcatcgagcatcaaatgaaactgcaatttattcatatcaggattatcaataccatatttttgaaaaagccgtttctgtaatgaaggagaaaactcaccgaggcagttccataggatggcaagatcctggtatcggtctgcgattccgactcgtccaacatcaatacaacctattaatttcccctcgtcaaaaataaggttatcaagtgagaaatcaccatgagtgacgactgaatccggtgagaatggcaaaagcttatgcatttctttccagacttgttcaacaggccagccattacgctcgtcatcaaaatcactcgcatcaaccaaaccgttattcattcgtgattgcgcctgagcgagacgaaatacgcgatcgctgttaaaaggacaattacaaacaggaatcgaatgcaaccggcgcaggaacactgccagcgcatcaacaatattttcacctgaatcaggatattcttctaatacctggaatgctgttttcccggggatcgcagtggtgagtaaccatgcatcatcaggagtacggataaaatgcttgatggtcggaagaggcataaattccgtcagccagtttagtctgaccatctcatctgtaacatcattggcaacgctacctttgccatgtttcagaaacaactctggcgcatcgggcttcccatacaatcgatagattgtcgcacctgattgcccgacattatcgcgagcccatttatacccatataaatcagcatccatgttggaatttaatcgcggcctcgagcaagacgtttcccgttgaatatggctcat

SEQ ID NO: 127 - DNA, 5291 bp, Artificial
  Synthetic
aacaccccttgtattactgtttatgtaagcagacagttttattgttcatgatgatatatttttatcttgtgcaatgtaacatcagagattttgagacacaacgtggctttccatcaaaaaaatattgacaacataaaaaactttgtgttatacttgtggaattgtgagcggataacaattctatatctgttattttttccaaccacagatctatgagcaaaggtgaagaggaggataacatggccatcatcaaggagttcatgcgcttcaaggtgcacatggagggctccgtgaacggccacgagttcgagatcgagggcgagggcgagggccgcccctacgagggcacccagaccgccaagctgaaggtgaccaagggcggccccctgcccttcgcctgggacatcctgtcccctcagttcatgtacggctccaaggcctacgtgaagcaccccgccgacatccccgactacttgaagctgtccttccccgagggcttcaagtgggagcgcgtgatgaacttcgaggacggcggcgtggtgaccgtgacccaggactcctccctacaggacggcgagttcatctacaaggtgaagctgcgcggcaccaacttcccctccgacggccccgtaatgcagaagaagaccatgggctgggaggcctcctccgagcggatgtaccccgaggacggcgccctgaagggcgagatcaagcagaggctgaagctgaaggacggcggccactacgacgccgaggtcaagaccacctacaaggccaagaagcccgtgcagctgcccggcgcctacaacgtcaacatcaagctggacatcacctcccacaacgaggactacaccatcgtggaacagtacgagcgcgccgagggccgccactccaccggcggcatggacgagctgtacaagtaagtcgaccggctgctaacaaagcccgcggccgctgaagatcgatctcgacgagtgagagaagattttcagcctgatacagattaaatcagaacgcagaagcggtctgataaaacagaatttgcctggcggcagtagcgcggtggtcccacctgaccccatgccgaactcagaagtgaaacgccgtagcgccgatggtagtgtggggtcaccccatgcgagagtagggaactgccaggcatcaaataaaacgaaaggctcagtcgaaagactgggcctttcgttttatctgttgtttgtcggtgaacgctctcctgagtaggacaaatccgccgggagcggatttgaacgttgcgaagcaacggcccggagggtggcgggcaggacgcccgccataaactgccaggcatcaaattaagcagaaggccatcctgacggatggcctttttgcgtttctacagagcgtcagaccccttaataagatgatcttcttgagatcgttttggtctgcgcgtaatctcttgctctgaaaacgaaaaaaccgccttgcagggcggtttttcgaaggttctctgagctaccaactctttgaaccgaggtaactggcttggaggagcgcagtcaccaaaacttgtcctttcagtttagccttaaccggcgcatgacttcaagactaactcctctaaatcaattaccagtggctgctgccagtggtgcttttgcatgtctttccgggttggactcaagacgatagttaccggataaggcgcagcggtcggactgaacggggggttcgtgcatacagtccagcttggagcgaactgcctacccggaactgagtgtcaggcgtggaatgagacaaacgcggccataacagcggaatgacaccggtaaaccgaaaggcaggaacaggagagcgcacgagggagccgccagggggaaacgcctggtatctttatagtcctgtcgggtttcgccaccactgatttgagcgtcagatttcgtgatgcttgtcaggggggcggagcctatggaaaaacggctttgccgcggccctctcggatctgtatggtgcactctcagtacaatctgctctgatgccgcatagttaagccagtatacactccgctatcgctacgtgactgcctcgacctgcagcaattccaacgccatcaaaaataattcgcgtctggccttcctgtagccagctttcatcaacattaaatgtgagcgagtaacaacccgtcggattctccgtgggaacaaacggcggattgaccgtaatgggataggtcacgttggtgtagatgggcgcatcgtaaccgtgcatctgccagtttgaggggacgacgacagtatcggcctcaggaagatcgcactccagccagctttccggcaccgcttctggtgccggaaaccaggcaaagcgccattcgccattcaggctgcgcaactgttgggaagggcgatcggtgcgggcctcttcgctattacgccagctggcgaaagggggatgtgctgcaaggcgattaagttgggtaacgccagggttttcccagtcacgacgttgtaaaacgacggccagtgaatccgtaatcatggtcatagctgtttcctgtgtgaaattgttatccgctcacaattccacacaacatacgagccggaagcataaagtgtaaagcctggggtgcctaatgagtgagctaacttacattaattgcgttgcgctcactgcccgctttccagtcgggaaacctgtcgtgccagctgcattaatgaatcggccaacgcgcggggagaggcggtttgcgtattgggcgccagggtggtttttcttttcaccagtgagacgggcaacagctgattgcccttcaccgcctggccctgagagagttgcagcaagcggtccacgctggtttgccccagcaggcgaaaatcctgtttgatggtggttaacggcgggatataacatgagctgtcttcggtatcgtcgtatcccactaccgagatatccgcaccaacgcgcagcccggactcggtaatggcgcgcattgcgcccagcgccatctgatcgttggcaaccagcatcgcagtgggaacgatgccctcattcagcatttgcatggtttgttgaaaaccggacatggcactccagtcgccttcccgttccgctatcggctgaatttgattgcgagtgagatatttatgccagccagccagacgcagacgcgccgagacagaacttaatgggcccgctaacagcgcgatttgctggtgacccaatgcgaccagatgctccacgcccagtcgcgtaccgtcttcatgggagaaaataatactgttgatgggtgtctggtcagagacatcaagaaataacgccggaacattagtgcaggcagcttccacagcaatggcatcctggtcatccagcggatagttaatgatcagcccactgacgcgttgcgcgagaagattgtgcaccgccgctttacaggcttcgacgccgcttcgttctaccatcgacaccaccacgctggcacccagttgatcggcgcgagatttaatcgccgcgacaatttgcgacggcgcgtgcagggccagactggaggtggcaacgccaatcagcaacgactgtttgcccgccagttgttgtgccacgcggttgggaatgtaattcagctccgccatcgccgcttccactttttcccgcgttttcgcagaaacgtggctggcctggttcaccacgcgggaaacggtctgataagagacaccggcatactctgcgacatcgtataacgttactggtttcacattcaccaccctgaattgactctcttccgggcgctatcatgccataccgcgaaaggttttgcaccattccatggtgtcggaattgctgcaggtcgagggggtcatggctgcgccccgacacccgccaacacccgctgacgcgccctgacgggcttgtctgctcccggcatccgcttacagacaagctgtgaccgtctccgggagctgcatgtgtcagaggttttcaccgtcatcaccgaaacgcgcgaggcaggatggcgcccaacagtcccccggccacggggcctgccaccatacccacgccgaaacaagcgctcatgagcccgaagtggcgagcccgatcttccccatcggtgatgtcggcgatataggcgccagcaaccgcacctgtggcgccggtgatgccggccacgatgcgtccggcgtagaggatccgtcgacctgcaggggggggggggcgctgaggtctgcctcgtgaagaaggtgttgctgactcataccaggcctgaatcgccccatcatccagccagaaagtgagggagccacggttgatgagagctttgttgtaggtggaccagttggtgattttgaacttttgctttgccacggaacggtctgcgttgtcgggaagatgcgtgatctgatccttcaactcagcaaaagttcgatttattcaacaaagccgccgtcccgtcaagtcagcgtaatgctctgccagtgttacaaccaattaaccaattctgattagaaaaactcatcgagcatcaaatgaaactgcaatttattcatatcaggattatcaataccatatttttgaaaaagccgtttctgtaatgaaggagaaaactcaccgaggcagttccataggatggcaagatcctggtatcggtctgcgattccgactcgtccaacatcaatacaacctattaatttcccctcgtcaaaaataaggttatcaagtgagaaatcaccatgagtgacgactgaatccggtgagaatggcaaaagcttatgcatttctttccagacttgttcaacaggccagccattacgctcgtcatcaaaatcactcgcatcaaccaaaccgttattcattcgtgattgcgcctgagcgagacgaaatacgcgatcgctgttaaaaggacaattacaaacaggaatcgaatgcaaccggcgcaggaacactgccagcgcatcaacaatattttcacctgaatcaggatattcttctaatacctggaatgctgttttcccggggatcgcagtggtgagtaaccatgcatcatcaggagtacggataaaatgcttgatggtcggaagaggcataaattccgtcagccagtttagtctgaccatctcatctgtaacatcattggcaacgctacctttgccatgtttcagaaacaactctggcgcatcgggcttcccatacaatcgatagattgtcgcacctgattgcccgacattatcgcgagcccatttatacccatataaatcagcatccatgttggaatttaatcgcggcctcgagcaagacgtttcccgttgaatatggctcat

SEQ ID NO: 128 - DNA, 5291 bp, Artificial
  Synthetic
aacaccccttgtattactgtttatgtaagcagacagttttattgttcatgatgatatatttttatcttgtgcaatgtaacatcagagattttgagacacaacgtggctttccatcaaaaaaatattgacaacataaaaaactttgtgttatacttgtggaattgtgagcggataacaattctatatctgttattttttccaaccacagatctatgagcaaaggtgaagaagaggataacatggccatcatcaaggagttcatgcgcttcaaggtgcacatggagggctccgtgaacggccacgagttcgagatcgagggcgagggcgagggccgcccctacgagggcacccagaccgccaagctgaaggtgaccaagggcggccccctgcccttcgcctgggacatcctgtcccctcagttcatgtacggctccaaggcctacgtgaagcaccccgccgacatccccgactacttgaagctgtccttccccgagggcttcaagtgggagcgcgtgatgaacttcgaggacggcggcgtggtgaccgtgacccaggactcctccctacaggacggcgagttcatctacaaggtgaagctgcgcggcaccaacttcccctccgacggccccgtaatgcagaagaagaccatgggctgggaggcctcctccgagcggatgtaccccgaggacggcgccctgaagggcgagatcaagcagaggctgaagctgaaggacggcggccactacgacgccgaggtcaagaccacctacaaggccaagaagcccgtgcagctgcccggcgcctacaacgtcaacatcaagctggacatcacctcccacaacgaggactacaccatcgtggaacagtacgagcgcgccgagggccgccactccaccggcggcatggacgagctgtacaagtaagtcgaccggctgctaacaaagcccgcggccgctgaagatcgatctcgacgagtgagagaagattttcagcctgatacagattaaatcagaacgcagaagcggtctgataaaacagaatttgcctggcggcagtagcgcggtggtcccacctgaccccatgccgaactcagaagtgaaacgccgtagcgccgatggtagtgtggggtcaccccatgcgagagtagggaactgccaggcatcaaataaaacgaaaggctcagtcgaaagactgggcctttcgttttatctgttgtttgtcggtgaacgctctcctgagtaggacaaatccgccgggagcggatttgaacgttgcgaagcaacggcccggagggtggcgggcaggacgcccgccataaactgccaggcatcaaattaagcagaaggccatcctgacggatggcctttttgcgtttctacagagcgtcagaccccttaataagatgatcttcttgagatcgttttggtctgcgcgtaatctcttgctctgaaaacgaaaaaaccgccttgcagggcggtttttcgaaggttctctgagctaccaactctttgaaccgaggtaactggcttggaggagcgcagtcaccaaaacttgtcctttcagtttagccttaaccggcgcatgacttcaagactaactcctctaaatcaattaccagtggctgctgccagtggtgcttttgcatgtctttccgggttggactcaagacgatagttaccggataaggcgcagcggtcggactgaacggggggttcgtgcatacagtccagcttggagcgaactgcctacccggaactgagtgtcaggcgtggaatgagacaaacgcggccataacagcggaatgacaccggtaaaccgaaaggcaggaacaggagagcgcacgagggagccgccagggggaaacgcctggtatctttatagtcctgtcgggtttcgccaccactgatttgagcgtcagatttcgtgatgcttgtcaggggggcggagcctatggaaaaacggctttgccgcggccctctcggatctgtatggtgcactctcagtacaatctgctctgatgccgcatagttaagccagtatacactccgctatcgctacgtgactgcctcgacctgcagcaattccaacgccatcaaaaataattcgcgtctggccttcctgtagccagctttcatcaacattaaatgtgagcgagtaacaacccgtcggattctccgtgggaacaaacggcggattgaccgtaatgggataggtcacgttggtgtagatgggcgcatcgtaaccgtgcatctgccagtttgaggggacgacgacagtatcggcctcaggaagatcgcactccagccagctttccggcaccgcttctggtgccggaaaccaggcaaagcgccattcgccattcaggctgcgcaactgttgggaagggcgatcggtgcgggcctcttcgctattacgccagctggcgaaagggggatgtgctgcaaggcgattaagttgggtaacgccagggttttcccagtcacgacgttgtaaaacgacggccagtgaatccgtaatcatggtcatagctgtttcctgtgtgaaattgttatccgctcacaattccacacaacatacgagccggaagcataaagtgtaaagcctggggtgcctaatgagtgagctaacttacattaattgcgttgcgctcactgcccgctttccagtcgggaaacctgtcgtgccagctgcattaatgaatcggccaacgcgcggggagaggcggtttgcgtattgggcgccagggtggtttttcttttcaccagtgagacgggcaacagctgattgcccttcaccgcctggccctgagagagttgcagcaagcggtccacgctggtttgccccagcaggcgaaaatcctgtttgatggtggttaacggcgggatataacatgagctgtcttcggtatcgtcgtatcccactaccgagatatccgcaccaacgcgcagcccggactcggtaatggcgcgcattgcgcccagcgccatctgatcgttggcaaccagcatcgcagtgggaacgatgccctcattcagcatttgcatggtttgttgaaaaccggacatggcactccagtcgccttcccgttccgctatcggctgaatttgattgcgagtgagatatttatgccagccagccagacgcagacgcgccgagacagaacttaatgggcccgctaacagcgcgatttgctggtgacccaatgcgaccagatgctccacgcccagtcgcgtaccgtcttcatgggagaaaataatactgttgatgggtgtctggtcagagacatcaagaaataacgccggaacattagtgcaggcagcttccacagcaatggcatcctggtcatccagcggatagttaatgatcagcccactgacgcgttgcgcgagaagattgtgcaccgccgctttacaggcttcgacgccgcttcgttctaccatcgacaccaccacgctggcacccagttgatcggcgcgagatttaatcgccgcgacaatttgcgacggcgcgtgcagggccagactggaggtggcaacgccaatcagcaacgactgtttgcccgccagttgttgtgccacgcggttgggaatgtaattcagctccgccatcgccgcttccactttttcccgcgttttcgcagaaacgtggctggcctggttcaccacgcgggaaacggtctgataagagacaccggcatactctgcgacatcgtataacgttactggtttcacattcaccaccctgaattgactctcttccgggcgctatcatgccataccgcgaaaggttttgcaccattccatggtgtcggaattgctgcaggtcgagggggtcatggctgcgccccgacacccgccaacacccgctgacgcgccctgacgggcttgtctgctcccggcatccgcttacagacaagctgtgaccgtctccgggagctgcatgtgtcagaggttttcaccgtcatcaccgaaacgcgcgaggcaggatggcgcccaacagtcccccggccacggggcctgccaccatacccacgccgaaacaagcgctcatgagcccgaagtggcgagcccgatcttccccatcggtgatgtcggcgatataggcgccagcaaccgcacctgtggcgccggtgatgccggccacgatgcgtccggcgtagaggatccgtcgacctgcaggggggggggggcgctgaggtctgcctcgtgaagaaggtgttgctgactcataccaggcctgaatcgccccatcatccagccagaaagtgagggagccacggttgatgagagctttgttgtaggtggaccagttggtgattttgaacttttgctttgccacggaacggtctgcgttgtcgggaagatgcgtgatctgatccttcaactcagcaaaagttcgatttattcaacaaagccgccgtcccgtcaagtcagcgtaatgctctgccagtgttacaaccaattaaccaattctgattagaaaaactcatcgagcatcaaatgaaactgcaatttattcatatcaggattatcaataccatatttttgaaaaagccgtttctgtaatgaaggagaaaactcaccgaggcagttccataggatggcaagatcctggtatcggtctgcgattccgactcgtccaacatcaatacaacctattaatttcccctcgtcaaaaataaggttatcaagtgagaaatcaccatgagtgacgactgaatccggtgagaatggcaaaagcttatgcatttctttccagacttgttcaacaggccagccattacgctcgtcatcaaaatcactcgcatcaaccaaaccgttattcattcgtgattgcgcctgagcgagacgaaatacgcgatcgctgttaaaaggacaattacaaacaggaatcgaatgcaaccggcgcaggaacactgccagcgcatcaacaatattttcacctgaatcaggatattcttctaatacctggaatgctgttttcccggggatcgcagtggtgagtaaccatgcatcatcaggagtacggataaaatgcttgatggtcggaagaggcataaattccgtcagccagtttagtctgaccatctcatctgtaacatcattggcaacgctacctttgccatgtttcagaaacaactctggcgcatcgggcttcccatacaatcgatagattgtcgcacctgattgcccgacattatcgcgagcccatttatacccatataaatcagcatccatgttggaatttaatcgcggcctcgagcaagacgtttcccgttgaatatggctcat

SEQ ID NO: 129 - DNA, 5291 bp, Artificial
  Synthetic
aacaccccttgtattactgtttatgtaagcagacagttttattgttcatgatgatatatttttatcttgtgcaatgtaacatcagagattttgagacacaacgtggctttccatcaaaaaaatattgacaacataaaaaactttgtgttatacttgtggaattgtgagcggataacaattctatatctgttattttttccaaccacagatctatgagcaaaggtgaagaactggataacatggccatcatcaaggagttcatgcgcttcaaggtgcacatggagggctccgtgaacggccacgagttcgagatcgagggcgagggcgagggccgcccctacgagggcacccagaccgccaagctgaaggtgaccaagggcggccccctgcccttcgcctgggacatcctgtcccctcagttcatgtacggctccaaggcctacgtgaagcaccccgccgacatccccgactacttgaagctgtccttccccgagggcttcaagtgggagcgcgtgatgaacttcgaggacggcggcgtggtgaccgtgacccaggactcctccctacaggacggcgagttcatctacaaggtgaagctgcgcggcaccaacttcccctccgacggccccgtaatgcagaagaagaccatgggctgggaggcctcctccgagcggatgtaccccgaggacggcgccctgaagggcgagatcaagcagaggctgaagctgaaggacggcggccactacgacgccgaggtcaagaccacctacaaggccaagaagcccgtgcagctgcccggcgcctacaacgtcaacatcaagctggacatcacctcccacaacgaggactacaccatcgtggaacagtacgagcgcgccgagggccgccactccaccggcggcatggacgagctgtacaagtaagtcgaccggctgctaacaaagcccgcggccgctgaagatcgatctcgacgagtgagagaagattttcagcctgatacagattaaatcagaacgcagaagcggtctgataaaacagaatttgcctggcggcagtagcgcggtggtcccacctgaccccatgccgaactcagaagtgaaacgccgtagcgccgatggtagtgtggggtcaccccatgcgagagtagggaactgccaggcatcaaataaaacgaaaggctcagtcgaaagactgggcctttcgttttatctgttgtttgtcggtgaacgctctcctgagtaggacaaatccgccgggagcggatttgaacgttgcgaagcaacggcccggagggtggcgggcaggacgcccgccataaactgccaggcatcaaattaagcagaaggccatcctgacggatggcctttttgcgtttctacagagcgtcagaccccttaataagatgatcttcttgagatcgttttggtctgcgcgtaatctcttgctctgaaaacgaaaaaaccgccttgcagggcggtttttcgaaggttctctgagctaccaactctttgaaccgaggtaactggcttggaggagcgcagtcaccaaaacttgtcctttcagtttagccttaaccggcgcatgacttcaagactaactcctctaaatcaattaccagtggctgctgccagtggtgcttttgcatgtctttccgggttggactcaagacgatagttaccggataaggcgcagcggtcggactgaacggggggttcgtgcatacagtccagcttggagcgaactgcctacccggaactgagtgtcaggcgtggaatgagacaaacgcggccataacagcggaatgacaccggtaaaccgaaaggcaggaacaggagagcgcacgagggagccgccagggggaaacgcctggtatctttatagtcctgtcgggtttcgccaccactgatttgagcgtcagatttcgtgatgcttgtcaggggggcggagcctatggaaaaacggctttgccgcggccctctcggatctgtatggtgcactctcagtacaatctgctctgatgccgcatagttaagccagtatacactccgctatcgctacgtgactgcctcgacctgcagcaattccaacgccatcaaaaataattcgcgtctggccttcctgtagccagctttcatcaacattaaatgtgagcgagtaacaacccgtcggattctccgtgggaacaaacggcggattgaccgtaatgggataggtcacgttggtgtagatgggcgcatcgtaaccgtgcatctgccagtttgaggggacgacgacagtatcggcctcaggaagatcgcactccagccagctttccggcaccgcttctggtgccggaaaccaggcaaagcgccattcgccattcaggctgcgcaactgttgggaagggcgatcggtgcgggcctcttcgctattacgccagctggcgaaagggggatgtgctgcaaggcgattaagttgggtaacgccagggttttcccagtcacgacgttgtaaaacgacggccagtgaatccgtaatcatggtcatagctgtttcctgtgtgaaattgttatccgctcacaattccacacaacatacgagccggaagcataaagtgtaaagcctggggtgcctaatgagtgagctaacttacattaattgcgttgcgctcactgcccgctttccagtcgggaaacctgtcgtgccagctgcattaatgaatcggccaacgcgcggggagaggcggtttgcgtattgggcgccagggtggtttttcttttcaccagtgagacgggcaacagctgattgcccttcaccgcctggccctgagagagttgcagcaagcggtccacgctggtttgccccagcaggcgaaaatcctgtttgatggtggttaacggcgggatataacatgagctgtcttcggtatcgtcgtatcccactaccgagatatccgcaccaacgcgcagcccggactcggtaatggcgcgcattgcgcccagcgccatctgatcgttggcaaccagcatcgcagtgggaacgatgccctcattcagcatttgcatggtttgttgaaaaccggacatggcactccagtcgccttcccgttccgctatcggctgaatttgattgcgagtgagatatttatgccagccagccagacgcagacgcgccgagacagaacttaatgggcccgctaacagcgcgatttgctggtgacccaatgcgaccagatgctccacgcccagtcgcgtaccgtcttcatgggagaaaataatactgttgatgggtgtctggtcagagacatcaagaaataacgccggaacattagtgcaggcagcttccacagcaatggcatcctggtcatccagcggatagttaatgatcagcccactgacgcgttgcgcgagaagattgtgcaccgccgctttacaggcttcgacgccgcttcgttctaccatcgacaccaccacgctggcacccagttgatcggcgcgagatttaatcgccgcgacaatttgcgacggcgcgtgcagggccagactggaggtggcaacgccaatcagcaacgactgtttgcccgccagttgttgtgccacgcggttgggaatgtaattcagctccgccatcgccgcttccactttttcccgcgttttcgcagaaacgtggctggcctggttcaccacgcgggaaacggtctgataagagacaccggcatactctgcgacatcgtataacgttactggtttcacattcaccaccctgaattgactctcttccgggcgctatcatgccataccgcgaaaggttttgcaccattccatggtgtcggaattgctgcaggtcgagggggtcatggctgcgccccgacacccgccaacacccgctgacgcgccctgacgggcttgtctgctcccggcatccgcttacagacaagctgtgaccgtctccgggagctgcatgtgtcagaggttttcaccgtcatcaccgaaacgcgcgaggcaggatggcgcccaacagtcccccggccacggggcctgccaccatacccacgccgaaacaagcgctcatgagcccgaagtggcgagcccgatcttccccatcggtgatgtcggcgatataggcgccagcaaccgcacctgtggcgccggtgatgccggccacgatgcgtccggcgtagaggatccgtcgacctgcaggggggggggggcgctgaggtctgcctcgtgaagaaggtgttgctgactcataccaggcctgaatcgccccatcatccagccagaaagtgagggagccacggttgatgagagctttgttgtaggtggaccagttggtgattttgaacttttgctttgccacggaacggtctgcgttgtcgggaagatgcgtgatctgatccttcaactcagcaaaagttcgatttattcaacaaagccgccgtcccgtcaagtcagcgtaatgctctgccagtgttacaaccaattaaccaattctgattagaaaaactcatcgagcatcaaatgaaactgcaatttattcatatcaggattatcaataccatatttttgaaaaagccgtttctgtaatgaaggagaaaactcaccgaggcagttccataggatggcaagatcctggtatcggtctgcgattccgactcgtccaacatcaatacaacctattaatttcccctcgtcaaaaataaggttatcaagtgagaaatcaccatgagtgacgactgaatccggtgagaatggcaaaagcttatgcatttctttccagacttgttcaacaggccagccattacgctcgtcatcaaaatcactcgcatcaaccaaaccgttattcattcgtgattgcgcctgagcgagacgaaatacgcgatcgctgttaaaaggacaattacaaacaggaatcgaatgcaaccggcgcaggaacactgccagcgcatcaacaatattttcacctgaatcaggatattcttctaatacctggaatgctgttttcccggggatcgcagtggtgagtaaccatgcatcatcaggagtacggataaaatgcttgatggtcggaagaggcataaattccgtcagccagtttagtctgaccatctcatctgtaacatcattggcaacgctacctttgccatgtttcagaaacaactctggcgcatcgggcttcccatacaatcgatagattgtcgcacctgattgcccgacattatcgcgagcccatttatacccatataaatcagcatccatgttggaatttaatcgcggcctcgagcaagacgtttcccgttgaatatggctcat

SEQ ID NO: 130 - DNA, 5291 bp, Artificial
  Synthetic
aacaccccttgtattactgtttatgtaagcagacagttttattgttcatgatgatatatttttatcttgtgcaatgtaacatcagagattttgagacacaacgtggctttccatcaaaaaaatattgacaacataaaaaactttgtgttatacttgtggaattgtgagcggataacaattctatatctgttattttttccaaccacagatctatgagcaaaggtgaagaactgtttaacatggccatcatcaaggagttcatgcgcttcaaggtgcacatggagggctccgtgaacggccacgagttcgagatcgagggcgagggcgagggccgcccctacgagggcacccagaccgccaagctgaaggtgaccaagggcggccccctgcccttcgcctgggacatcctgtcccctcagttcatgtacggctccaaggcctacgtgaagcaccccgccgacatccccgactacttgaagctgtccttccccgagggcttcaagtgggagcgcgtgatgaacttcgaggacggcggcgtggtgaccgtgacccaggactcctccctacaggacggcgagttcatctacaaggtgaagctgcgcggcaccaacttcccctccgacggccccgtaatgcagaagaagaccatgggctgggaggcctcctccgagcggatgtaccccgaggacggcgccctgaagggcgagatcaagcagaggctgaagctgaaggacggcggccactacgacgccgaggtcaagaccacctacaaggccaagaagcccgtgcagctgcccggcgcctacaacgtcaacatcaagctggacatcacctcccacaacgaggactacaccatcgtggaacagtacgagcgcgccgagggccgccactccaccggcggcatggacgagctgtacaagtaagtcgaccggctgctaacaaagcccgcggccgctgaagatcgatctcgacgagtgagagaagattttcagcctgatacagattaaatcagaacgcagaagcggtctgataaaacagaatttgcctggcggcagtagcgcggtggtcccacctgaccccatgccgaactcagaagtgaaacgccgtagcgccgatggtagtgtggggtcaccccatgcgagagtagggaactgccaggcatcaaataaaacgaaaggctcagtcgaaagactgggcctttcgttttatctgttgtttgtcggtgaacgctctcctgagtaggacaaatccgccgggagcggatttgaacgttgcgaagcaacggcccggagggtggcgggcaggacgcccgccataaactgccaggcatcaaattaagcagaaggccatcctgacggatggcctttttgcgtttctacagagcgtcagaccccttaataagatgatcttcttgagatcgttttggtctgcgcgtaatctcttgctctgaaaacgaaaaaaccgccttgcagggcggtttttcgaaggttctctgagctaccaactctttgaaccgaggtaactggcttggaggagcgcagtcaccaaaacttgtcctttcagtttagccttaaccggcgcatgacttcaagactaactcctctaaatcaattaccagtggctgctgccagtggtgcttttgcatgtctttccgggttggactcaagacgatagttaccggataaggcgcagcggtcggactgaacggggggttcgtgcatacagtccagcttggagcgaactgcctacccggaactgagtgtcaggcgtggaatgagacaaacgcggccataacagcggaatgacaccggtaaaccgaaaggcaggaacaggagagcgcacgagggagccgccagggggaaacgcctggtatctttatagtcctgtcgggtttcgccaccactgatttgagcgtcagatttcgtgatgcttgtcaggggggcggagcctatggaaaaacggctttgccgcggccctctcggatctgtatggtgcactctcagtacaatctgctctgatgccgcatagttaagccagtatacactccgctatcgctacgtgactgcctcgacctgcagcaattccaacgccatcaaaaataattcgcgtctggccttcctgtagccagctttcatcaacattaaatgtgagcgagtaacaacccgtcggattctccgtgggaacaaacggcggattgaccgtaatgggataggtcacgttggtgtagatgggcgcatcgtaaccgtgcatctgccagtttgaggggacgacgacagtatcggcctcaggaagatcgcactccagccagctttccggcaccgcttctggtgccggaaaccaggcaaagcgccattcgccattcaggctgcgcaactgttgggaagggcgatcggtgcgggcctcttcgctattacgccagctggcgaaagggggatgtgctgcaaggcgattaagttgggtaacgccagggttttcccagtcacgacgttgtaaaacgacggccagtgaatccgtaatcatggtcatagctgtttcctgtgtgaaattgttatccgctcacaattccacacaacatacgagccggaagcataaagtgtaaagcctggggtgcctaatgagtgagctaacttacattaattgcgttgcgctcactgcccgctttccagtcgggaaacctgtcgtgccagctgcattaatgaatcggccaacgcgcggggagaggcggtttgcgtattgggcgccagggtggtttttcttttcaccagtgagacgggcaacagctgattgcccttcaccgcctggccctgagagagttgcagcaagcggtccacgctggtttgccccagcaggcgaaaatcctgtttgatggtggttaacggcgggatataacatgagctgtcttcggtatcgtcgtatcccactaccgagatatccgcaccaacgcgcagcccggactcggtaatggcgcgcattgcgcccagcgccatctgatcgttggcaaccagcatcgcagtgggaacgatgccctcattcagcatttgcatggtttgttgaaaaccggacatggcactccagtcgccttcccgttccgctatcggctgaatttgattgcgagtgagatatttatgccagccagccagacgcagacgcgccgagacagaacttaatgggcccgctaacagcgcgatttgctggtgacccaatgcgaccagatgctccacgcccagtcgcgtaccgtcttcatgggagaaaataatactgttgatgggtgtctggtcagagacatcaagaaataacgccggaacattagtgcaggcagcttccacagcaatggcatcctggtcatccagcggatagttaatgatcagcccactgacgcgttgcgcgagaagattgtgcaccgccgctttacaggcttcgacgccgcttcgttctaccatcgacaccaccacgctggcacccagttgatcggcgcgagatttaatcgccgcgacaatttgcgacggcgcgtgcagggccagactggaggtggcaacgccaatcagcaacgactgtttgcccgccagttgttgtgccacgcggttgggaatgtaattcagctccgccatcgccgcttccactttttcccgcgttttcgcagaaacgtggctggcctggttcaccacgcgggaaacggtctgataagagacaccggcatactctgcgacatcgtataacgttactggtttcacattcaccaccctgaattgactctcttccgggcgctatcatgccataccgcgaaaggttttgcaccattccatggtgtcggaattgctgcaggtcgagggggtcatggctgcgccccgacacccgccaacacccgctgacgcgccctgacgggcttgtctgctcccggcatccgcttacagacaagctgtgaccgtctccgggagctgcatgtgtcagaggttttcaccgtcatcaccgaaacgcgcgaggcaggatggcgcccaacagtcccccggccacggggcctgccaccatacccacgccgaaacaagcgctcatgagcccgaagtggcgagcccgatcttccccatcggtgatgtcggcgatataggcgccagcaaccgcacctgtggcgccggtgatgccggccacgatgcgtccggcgtagaggatccgtcgacctgcaggggggggggggcgctgaggtctgcctcgtgaagaaggtgttgctgactcataccaggcctgaatcgccccatcatccagccagaaagtgagggagccacggttgatgagagctttgttgtaggtggaccagttggtgattttgaacttttgctttgccacggaacggtctgcgttgtcgggaagatgcgtgatctgatccttcaactcagcaaaagttcgatttattcaacaaagccgccgtcccgtcaagtcagcgtaatgctctgccagtgttacaaccaattaaccaattctgattagaaaaactcatcgagcatcaaatgaaactgcaatttattcatatcaggattatcaataccatatttttgaaaaagccgtttctgtaatgaaggagaaaactcaccgaggcagttccataggatggcaagatcctggtatcggtctgcgattccgactcgtccaacatcaatacaacctattaatttcccctcgtcaaaaataaggttatcaagtgagaaatcaccatgagtgacgactgaatccggtgagaatggcaaaagcttatgcatttctttccagacttgttcaacaggccagccattacgctcgtcatcaaaatcactcgcatcaaccaaaccgttattcattcgtgattgcgcctgagcgagacgaaatacgcgatcgctgttaaaaggacaattacaaacaggaatcgaatgcaaccggcgcaggaacactgccagcgcatcaacaatattttcacctgaatcaggatattcttctaatacctggaatgctgttttcccggggatcgcagtggtgagtaaccatgcatcatcaggagtacggataaaatgcttgatggtcggaagaggcataaattccgtcagccagtttagtctgaccatctcatctgtaacatcattggcaacgctacctttgccatgtttcagaaacaactctggcgcatcgggcttcccatacaatcgatagattgtcgcacctgattgcccgacattatcgcgagcccatttatacccatataaatcagcatccatgttggaatttaatcgcggcctcgagcaagacgtttcccgttgaatatggctcat

SEQ ID NO: 131 - DNA, 5291 bp, Artificial
  Synthetic
aacaccccttgtattactgtttatgtaagcagacagttttattgttcatgatgatatatttttatcttgtgcaatgtaacatcagagattttgagacacaacgtggctttccatcaaaaaaatattgacaacataaaaaactttgtgttatacttgtggaattgtgagcggataacaattctatatctgttattttttccaaccacagatctatgagcaaaggtgaagaactgtttaccatggccatcatcaaggagttcatgcgcttcaaggtgcacatggagggctccgtgaacggccacgagttcgagatcgagggcgagggcgagggccgcccctacgagggcacccagaccgccaagctgaaggtgaccaagggcggccccctgcccttcgcctgggacatcctgtcccctcagttcatgtacggctccaaggcctacgtgaagcaccccgccgacatccccgactacttgaagctgtccttccccgagggcttcaagtgggagcgcgtgatgaacttcgaggacggcggcgtggtgaccgtgacccaggactcctccctacaggacggcgagttcatctacaaggtgaagctgcgcggcaccaacttcccctccgacggccccgtaatgcagaagaagaccatgggctgggaggcctcctccgagcggatgtaccccgaggacggcgccctgaagggcgagatcaagcagaggctgaagctgaaggacggcggccactacgacgccgaggtcaagaccacctacaaggccaagaagcccgtgcagctgcccggcgcctacaacgtcaacatcaagctggacatcacctcccacaacgaggactacaccatcgtggaacagtacgagcgcgccgagggccgccactccaccggcggcatggacgagctgtacaagtaagtcgaccggctgctaacaaagcccgcggccgctgaagatcgatctcgacgagtgagagaagattttcagcctgatacagattaaatcagaacgcagaagcggtctgataaaacagaatttgcctggcggcagtagcgcggtggtcccacctgaccccatgccgaactcagaagtgaaacgccgtagcgccgatggtagtgtggggtcaccccatgcgagagtagggaactgccaggcatcaaataaaacgaaaggctcagtcgaaagactgggcctttcgttttatctgttgtttgtcggtgaacgctctcctgagtaggacaaatccgccgggagcggatttgaacgttgcgaagcaacggcccggagggtggcgggcaggacgcccgccataaactgccaggcatcaaattaagcagaaggccatcctgacggatggcctttttgcgtttctacagagcgtcagaccccttaataagatgatcttcttgagatcgttttggtctgcgcgtaatctcttgctctgaaaacgaaaaaaccgccttgcagggcggtttttcgaaggttctctgagctaccaactctttgaaccgaggtaactggcttggaggagcgcagtcaccaaaacttgtcctttcagtttagccttaaccggcgcatgacttcaagactaactcctctaaatcaattaccagtggctgctgccagtggtgcttttgcatgtctttccgggttggactcaagacgatagttaccggataaggcgcagcggtcggactgaacggggggttcgtgcatacagtccagcttggagcgaactgcctacccggaactgagtgtcaggcgtggaatgagacaaacgcggccataacagcggaatgacaccggtaaaccgaaaggcaggaacaggagagcgcacgagggagccgccagggggaaacgcctggtatctttatagtcctgtcgggtttcgccaccactgatttgagcgtcagatttcgtgatgcttgtcaggggggcggagcctatggaaaaacggctttgccgcggccctctcggatctgtatggtgcactctcagtacaatctgctctgatgccgcatagttaagccagtatacactccgctatcgctacgtgactgcctcgacctgcagcaattccaacgccatcaaaaataattcgcgtctggccttcctgtagccagctttcatcaacattaaatgtgagcgagtaacaacccgtcggattctccgtgggaacaaacggcggattgaccgtaatgggataggtcacgttggtgtagatgggcgcatcgtaaccgtgcatctgccagtttgaggggacgacgacagtatcggcctcaggaagatcgcactccagccagctttccggcaccgcttctggtgccggaaaccaggcaaagcgccattcgccattcaggctgcgcaactgttgggaagggcgatcggtgcgggcctcttcgctattacgccagctggcgaaagggggatgtgctgcaaggcgattaagttgggtaacgccagggttttcccagtcacgacgttgtaaaacgacggccagtgaatccgtaatcatggtcatagctgtttcctgtgtgaaattgttatccgctcacaattccacacaacatacgagccggaagcataaagtgtaaagcctggggtgcctaatgagtgagctaacttacattaattgcgttgcgctcactgcccgctttccagtcgggaaacctgtcgtgccagctgcattaatgaatcggccaacgcgcggggagaggcggtttgcgtattgggcgccagggtggtttttcttttcaccagtgagacgggcaacagctgattgcccttcaccgcctggccctgagagagttgcagcaagcggtccacgctggtttgccccagcaggcgaaaatcctgtttgatggtggttaacggcgggatataacatgagctgtcttcggtatcgtcgtatcccactaccgagatatccgcaccaacgcgcagcccggactcggtaatggcgcgcattgcgcccagcgccatctgatcgttggcaaccagcatcgcagtgggaacgatgccctcattcagcatttgcatggtttgttgaaaaccggacatggcactccagtcgccttcccgttccgctatcggctgaatttgattgcgagtgagatatttatgccagccagccagacgcagacgcgccgagacagaacttaatgggcccgctaacagcgcgatttgctggtgacccaatgcgaccagatgctccacgcccagtcgcgtaccgtcttcatgggagaaaataatactgttgatgggtgtctggtcagagacatcaagaaataacgccggaacattagtgcaggcagcttccacagcaatggcatcctggtcatccagcggatagttaatgatcagcccactgacgcgttgcgcgagaagattgtgcaccgccgctttacaggcttcgacgccgcttcgttctaccatcgacaccaccacgctggcacccagttgatcggcgcgagatttaatcgccgcgacaatttgcgacggcgcgtgcagggccagactggaggtggcaacgccaatcagcaacgactgtttgcccgccagttgttgtgccacgcggttgggaatgtaattcagctccgccatcgccgcttccactttttcccgcgttttcgcagaaacgtggctggcctggttcaccacgcgggaaacggtctgataagagacaccggcatactctgcgacatcgtataacgttactggtttcacattcaccaccctgaattgactctcttccgggcgctatcatgccataccgcgaaaggttttgcaccattccatggtgtcggaattgctgcaggtcgagggggtcatggctgcgccccgacacccgccaacacccgctgacgcgccctgacgggcttgtctgctcccggcatccgcttacagacaagctgtgaccgtctccgggagctgcatgtgtcagaggttttcaccgtcatcaccgaaacgcgcgaggcaggatggcgcccaacagtcccccggccacggggcctgccaccatacccacgccgaaacaagcgctcatgagcccgaagtggcgagcccgatcttccccatcggtgatgtcggcgatataggcgccagcaaccgcacctgtggcgccggtgatgccggccacgatgcgtccggcgtagaggatccgtcgacctgcaggggggggggggcgctgaggtctgcctcgtgaagaaggtgttgctgactcataccaggcctgaatcgccccatcatccagccagaaagtgagggagccacggttgatgagagctttgttgtaggtggaccagttggtgattttgaacttttgctttgccacggaacggtctgcgttgtcgggaagatgcgtgatctgatccttcaactcagcaaaagttcgatttattcaacaaagccgccgtcccgtcaagtcagcgtaatgctctgccagtgttacaaccaattaaccaattctgattagaaaaactcatcgagcatcaaatgaaactgcaatttattcatatcaggattatcaataccatatttttgaaaaagccgtttctgtaatgaaggagaaaactcaccgaggcagttccataggatggcaagatcctggtatcggtctgcgattccgactcgtccaacatcaatacaacctattaatttcccctcgtcaaaaataaggttatcaagtgagaaatcaccatgagtgacgactgaatccggtgagaatggcaaaagcttatgcatttctttccagacttgttcaacaggccagccattacgctcgtcatcaaaatcactcgcatcaaccaaaccgttattcattcgtgattgcgcctgagcgagacgaaatacgcgatcgctgttaaaaggacaattacaaacaggaatcgaatgcaaccggcgcaggaacactgccagcgcatcaacaatattttcacctgaatcaggatattcttctaatacctggaatgctgttttcccggggatcgcagtggtgagtaaccatgcatcatcaggagtacggataaaatgcttgatggtcggaagaggcataaattccgtcagccagtttagtctgaccatctcatctgtaacatcattggcaacgctacctttgccatgtttcagaaacaactctggcgcatcgggcttcccatacaatcgatagattgtcgcacctgattgcccgacattatcgcgagcccatttatacccatataaatcagcatccatgttggaatttaatcgcggcctcgagcaagacgtttcccgttgaatatggctcat

SEQ ID NO: 132 - DNA, 5291 bp, Artificial
  Synthetic
aacaccccttgtattactgtttatgtaagcagacagttttattgttcatgatgatatatttttatcttgtgcaatgtaacatcagagattttgagacacaacgtggctttccatcaaaaaaatattgacaacataaaaaactttgtgttatacttgtggaattgtgagcggataacaattctatatctgttattttttccaaccacagatctatgagcaaaggtgaagaactgtttaccggcgccatcatcaaggagttcatgcgcttcaaggtgcacatggagggctccgtgaacggccacgagttcgagatcgagggcgagggcgagggccgcccctacgagggcacccagaccgccaagctgaaggtgaccaagggcggccccctgcccttcgcctgggacatcctgtcccctcagttcatgtacggctccaaggcctacgtgaagcaccccgccgacatccccgactacttgaagctgtccttccccgagggcttcaagtgggagcgcgtgatgaacttcgaggacggcggcgtggtgaccgtgacccaggactcctccctacaggacggcgagttcatctacaaggtgaagctgcgcggcaccaacttcccctccgacggccccgtaatgcagaagaagaccatgggctgggaggcctcctccgagcggatgtaccccgaggacggcgccctgaagggcgagatcaagcagaggctgaagctgaaggacggcggccactacgacgccgaggtcaagaccacctacaaggccaagaagcccgtgcagctgcccggcgcctacaacgtcaacatcaagctggacatcacctcccacaacgaggactacaccatcgtggaacagtacgagcgcgccgagggccgccactccaccggcggcatggacgagctgtacaagtaagtcgaccggctgctaacaaagcccgcggccgctgaagatcgatctcgacgagtgagagaagattttcagcctgatacagattaaatcagaacgcagaagcggtctgataaaacagaatttgcctggcggcagtagcgcggtggtcccacctgaccccatgccgaactcagaagtgaaacgccgtagcgccgatggtagtgtggggtcaccccatgcgagagtagggaactgccaggcatcaaataaaacgaaaggctcagtcgaaagactgggcctttcgttttatctgttgtttgtcggtgaacgctctcctgagtaggacaaatccgccgggagcggatttgaacgttgcgaagcaacggcccggagggtggcgggcaggacgcccgccataaactgccaggcatcaaattaagcagaaggccatcctgacggatggcctttttgcgtttctacagagcgtcagaccccttaataagatgatcttcttgagatcgttttggtctgcgcgtaatctcttgctctgaaaacgaaaaaaccgccttgcagggcggtttttcgaaggttctctgagctaccaactctttgaaccgaggtaactggcttggaggagcgcagtcaccaaaacttgtcctttcagtttagccttaaccggcgcatgacttcaagactaactcctctaaatcaattaccagtggctgctgccagtggtgcttttgcatgtctttccgggttggactcaagacgatagttaccggataaggcgcagcggtcggactgaacggggggttcgtgcatacagtccagcttggagcgaactgcctacccggaactgagtgtcaggcgtggaatgagacaaacgcggccataacagcggaatgacaccggtaaaccgaaaggcaggaacaggagagcgcacgagggagccgccagggggaaacgcctggtatctttatagtcctgtcgggtttcgccaccactgatttgagcgtcagatttcgtgatgcttgtcaggggggcggagcctatggaaaaacggctttgccgcggccctctcggatctgtatggtgcactctcagtacaatctgctctgatgccgcatagttaagccagtatacactccgctatcgctacgtgactgcctcgacctgcagcaattccaacgccatcaaaaataattcgcgtctggccttcctgtagccagctttcatcaacattaaatgtgagcgagtaacaacccgtcggattctccgtgggaacaaacggcggattgaccgtaatgggataggtcacgttggtgtagatgggcgcatcgtaaccgtgcatctgccagtttgaggggacgacgacagtatcggcctcaggaagatcgcactccagccagctttccggcaccgcttctggtgccggaaaccaggcaaagcgccattcgccattcaggctgcgcaactgttgggaagggcgatcggtgcgggcctcttcgctattacgccagctggcgaaagggggatgtgctgcaaggcgattaagttgggtaacgccagggttttcccagtcacgacgttgtaaaacgacggccagtgaatccgtaatcatggtcatagctgtttcctgtgtgaaattgttatccgctcacaattccacacaacatacgagccggaagcataaagtgtaaagcctggggtgcctaatgagtgagctaacttacattaattgcgttgcgctcactgcccgctttccagtcgggaaacctgtcgtgccagctgcattaatgaatcggccaacgcgcggggagaggcggtttgcgtattgggcgccagggtggtttttcttttcaccagtgagacgggcaacagctgattgcccttcaccgcctggccctgagagagttgcagcaagcggtccacgctggtttgccccagcaggcgaaaatcctgtttgatggtggttaacggcgggatataacatgagctgtcttcggtatcgtcgtatcccactaccgagatatccgcaccaacgcgcagcccggactcggtaatggcgcgcattgcgcccagcgccatctgatcgttggcaaccagcatcgcagtgggaacgatgccctcattcagcatttgcatggtttgttgaaaaccggacatggcactccagtcgccttcccgttccgctatcggctgaatttgattgcgagtgagatatttatgccagccagccagacgcagacgcgccgagacagaacttaatgggcccgctaacagcgcgatttgctggtgacccaatgcgaccagatgctccacgcccagtcgcgtaccgtcttcatgggagaaaataatactgttgatgggtgtctggtcagagacatcaagaaataacgccggaacattagtgcaggcagcttccacagcaatggcatcctggtcatccagcggatagttaatgatcagcccactgacgcgttgcgcgagaagattgtgcaccgccgctttacaggcttcgacgccgcttcgttctaccatcgacaccaccacgctggcacccagttgatcggcgcgagatttaatcgccgcgacaatttgcgacggcgcgtgcagggccagactggaggtggcaacgccaatcagcaacgactgtttgcccgccagttgttgtgccacgcggttgggaatgtaattcagctccgccatcgccgcttccactttttcccgcgttttcgcagaaacgtggctggcctggttcaccacgcgggaaacggtctgataagagacaccggcatactctgcgacatcgtataacgttactggtttcacattcaccaccctgaattgactctcttccgggcgctatcatgccataccgcgaaaggttttgcaccattccatggtgtcggaattgctgcaggtcgagggggtcatggctgcgccccgacacccgccaacacccgctgacgcgccctgacgggcttgtctgctcccggcatccgcttacagacaagctgtgaccgtctccgggagctgcatgtgtcagaggttttcaccgtcatcaccgaaacgcgcgaggcaggatggcgcccaacagtcccccggccacggggcctgccaccatacccacgccgaaacaagcgctcatgagcccgaagtggcgagcccgatcttccccatcggtgatgtcggcgatataggcgccagcaaccgcacctgtggcgccggtgatgccggccacgatgcgtccggcgtagaggatccgtcgacctgcaggggggggggggcgctgaggtctgcctcgtgaagaaggtgttgctgactcataccaggcctgaatcgccccatcatccagccagaaagtgagggagccacggttgatgagagctttgttgtaggtggaccagttggtgattttgaacttttgctttgccacggaacggtctgcgttgtcgggaagatgcgtgatctgatccttcaactcagcaaaagttcgatttattcaacaaagccgccgtcccgtcaagtcagcgtaatgctctgccagtgttacaaccaattaaccaattctgattagaaaaactcatcgagcatcaaatgaaactgcaatttattcatatcaggattatcaataccatatttttgaaaaagccgtttctgtaatgaaggagaaaactcaccgaggcagttccataggatggcaagatcctggtatcggtctgcgattccgactcgtccaacatcaatacaacctattaatttcccctcgtcaaaaataaggttatcaagtgagaaatcaccatgagtgacgactgaatccggtgagaatggcaaaagcttatgcatttctttccagacttgttcaacaggccagccattacgctcgtcatcaaaatcactcgcatcaaccaaaccgttattcattcgtgattgcgcctgagcgagacgaaatacgcgatcgctgttaaaaggacaattacaaacaggaatcgaatgcaaccggcgcaggaacactgccagcgcatcaacaatattttcacctgaatcaggatattcttctaatacctggaatgctgttttcccggggatcgcagtggtgagtaaccatgcatcatcaggagtacggataaaatgcttgatggtcggaagaggcataaattccgtcagccagtttagtctgaccatctcatctgtaacatcattggcaacgctacctttgccatgtttcagaaacaactctggcgcatcgggcttcccatacaatcgatagattgtcgcacctgattgcccgacattatcgcgagcccatttatacccatataaatcagcatccatgttggaatttaatcgcggcctcgagcaagacgtttcccgttgaatatggctcat

SEQ ID NO: 133 - DNA, 5291 bp, Artificial
  Synthetic
aacaccccttgtattactgtttatgtaagcagacagttttattgttcatgatgatatatttttatcttgtgcaatgtaacatcagagattttgagacacaacgtggctttccatcaaaaaaatattgacaacataaaaaactttgtgttatacttgtggaattgtgagcggataacaattctatatctgttattttttccaaccacagatctatgagcaaaggtgaagaactgtttaccggcgttatcatcaaggagttcatgcgcttcaaggtgcacatggagggctccgtgaacggccacgagttcgagatcgagggcgagggcgagggccgcccctacgagggcacccagaccgccaagctgaaggtgaccaagggcggccccctgcccttcgcctgggacatcctgtcccctcagttcatgtacggctccaaggcctacgtgaagcaccccgccgacatccccgactacttgaagctgtccttccccgagggcttcaagtgggagcgcgtgatgaacttcgaggacggcggcgtggtgaccgtgacccaggactcctccctacaggacggcgagttcatctacaaggtgaagctgcgcggcaccaacttcccctccgacggccccgtaatgcagaagaagaccatgggctgggaggcctcctccgagcggatgtaccccgaggacggcgccctgaagggcgagatcaagcagaggctgaagctgaaggacggcggccactacgacgccgaggtcaagaccacctacaaggccaagaagcccgtgcagctgcccggcgcctacaacgtcaacatcaagctggacatcacctcccacaacgaggactacaccatcgtggaacagtacgagcgcgccgagggccgccactccaccggcggcatggacgagctgtacaagtaagtcgaccggctgctaacaaagcccgcggccgctgaagatcgatctcgacgagtgagagaagattttcagcctgatacagattaaatcagaacgcagaagcggtctgataaaacagaatttgcctggcggcagtagcgcggtggtcccacctgaccccatgccgaactcagaagtgaaacgccgtagcgccgatggtagtgtggggtcaccccatgcgagagtagggaactgccaggcatcaaataaaacgaaaggctcagtcgaaagactgggcctttcgttttatctgttgtttgtcggtgaacgctctcctgagtaggacaaatccgccgggagcggatttgaacgttgcgaagcaacggcccggagggtggcgggcaggacgcccgccataaactgccaggcatcaaattaagcagaaggccatcctgacggatggcctttttgcgtttctacagagcgtcagaccccttaataagatgatcttcttgagatcgttttggtctgcgcgtaatctcttgctctgaaaacgaaaaaaccgccttgcagggcggtttttcgaaggttctctgagctaccaactctttgaaccgaggtaactggcttggaggagcgcagtcaccaaaacttgtcctttcagtttagccttaaccggcgcatgacttcaagactaactcctctaaatcaattaccagtggctgctgccagtggtgcttttgcatgtctttccgggttggactcaagacgatagttaccggataaggcgcagcggtcggactgaacggggggttcgtgcatacagtccagcttggagcgaactgcctacccggaactgagtgtcaggcgtggaatgagacaaacgcggccataacagcggaatgacaccggtaaaccgaaaggcaggaacaggagagcgcacgagggagccgccagggggaaacgcctggtatctttatagtcctgtcgggtttcgccaccactgatttgagcgtcagatttcgtgatgcttgtcaggggggcggagcctatggaaaaacggctttgccgcggccctctcggatctgtatggtgcactctcagtacaatctgctctgatgccgcatagttaagccagtatacactccgctatcgctacgtgactgcctcgacctgcagcaattccaacgccatcaaaaataattcgcgtctggccttcctgtagccagctttcatcaacattaaatgtgagcgagtaacaacccgtcggattctccgtgggaacaaacggcggattgaccgtaatgggataggtcacgttggtgtagatgggcgcatcgtaaccgtgcatctgccagtttgaggggacgacgacagtatcggcctcaggaagatcgcactccagccagctttccggcaccgcttctggtgccggaaaccaggcaaagcgccattcgccattcaggctgcgcaactgttgggaagggcgatcggtgcgggcctcttcgctattacgccagctggcgaaagggggatgtgctgcaaggcgattaagttgggtaacgccagggttttcccagtcacgacgttgtaaaacgacggccagtgaatccgtaatcatggtcatagctgtttcctgtgtgaaattgttatccgctcacaattccacacaacatacgagccggaagcataaagtgtaaagcctggggtgcctaatgagtgagctaacttacattaattgcgttgcgctcactgcccgctttccagtcgggaaacctgtcgtgccagctgcattaatgaatcggccaacgcgcggggagaggcggtttgcgtattgggcgccagggtggtttttcttttcaccagtgagacgggcaacagctgattgcccttcaccgcctggccctgagagagttgcagcaagcggtccacgctggtttgccccagcaggcgaaaatcctgtttgatggtggttaacggcgggatataacatgagctgtcttcggtatcgtcgtatcccactaccgagatatccgcaccaacgcgcagcccggactcggtaatggcgcgcattgcgcccagcgccatctgatcgttggcaaccagcatcgcagtgggaacgatgccctcattcagcatttgcatggtttgttgaaaaccggacatggcactccagtcgccttcccgttccgctatcggctgaatttgattgcgagtgagatatttatgccagccagccagacgcagacgcgccgagacagaacttaatgggcccgctaacagcgcgatttgctggtgacccaatgcgaccagatgctccacgcccagtcgcgtaccgtcttcatgggagaaaataatactgttgatgggtgtctggtcagagacatcaagaaataacgccggaacattagtgcaggcagcttccacagcaatggcatcctggtcatccagcggatagttaatgatcagcccactgacgcgttgcgcgagaagattgtgcaccgccgctttacaggcttcgacgccgcttcgttctaccatcgacaccaccacgctggcacccagttgatcggcgcgagatttaatcgccgcgacaatttgcgacggcgcgtgcagggccagactggaggtggcaacgccaatcagcaacgactgtttgcccgccagttgttgtgccacgcggttgggaatgtaattcagctccgccatcgccgcttccactttttcccgcgttttcgcagaaacgtggctggcctggttcaccacgcgggaaacggtctgataagagacaccggcatactctgcgacatcgtataacgttactggtttcacattcaccaccctgaattgactctcttccgggcgctatcatgccataccgcgaaaggttttgcaccattccatggtgtcggaattgctgcaggtcgagggggtcatggctgcgccccgacacccgccaacacccgctgacgcgccctgacgggcttgtctgctcccggcatccgcttacagacaagctgtgaccgtctccgggagctgcatgtgtcagaggttttcaccgtcatcaccgaaacgcgcgaggcaggatggcgcccaacagtcccccggccacggggcctgccaccatacccacgccgaaacaagcgctcatgagcccgaagtggcgagcccgatcttccccatcggtgatgtcggcgatataggcgccagcaaccgcacctgtggcgccggtgatgccggccacgatgcgtccggcgtagaggatccgtcgacctgcaggggggggggggcgctgaggtctgcctcgtgaagaaggtgttgctgactcataccaggcctgaatcgccccatcatccagccagaaagtgagggagccacggttgatgagagctttgttgtaggtggaccagttggtgattttgaacttttgctttgccacggaacggtctgcgttgtcgggaagatgcgtgatctgatccttcaactcagcaaaagttcgatttattcaacaaagccgccgtcccgtcaagtcagcgtaatgctctgccagtgttacaaccaattaaccaattctgattagaaaaactcatcgagcatcaaatgaaactgcaatttattcatatcaggattatcaataccatatttttgaaaaagccgtttctgtaatgaaggagaaaactcaccgaggcagttccataggatggcaagatcctggtatcggtctgcgattccgactcgtccaacatcaatacaacctattaatttcccctcgtcaaaaataaggttatcaagtgagaaatcaccatgagtgacgactgaatccggtgagaatggcaaaagcttatgcatttctttccagacttgttcaacaggccagccattacgctcgtcatcaaaatcactcgcatcaaccaaaccgttattcattcgtgattgcgcctgagcgagacgaaatacgcgatcgctgttaaaaggacaattacaaacaggaatcgaatgcaaccggcgcaggaacactgccagcgcatcaacaatattttcacctgaatcaggatattcttctaatacctggaatgctgttttcccggggatcgcagtggtgagtaaccatgcatcatcaggagtacggataaaatgcttgatggtcggaagaggcataaattccgtcagccagtttagtctgaccatctcatctgtaacatcattggcaacgctacctttgccatgtttcagaaacaactctggcgcatcgggcttcccatacaatcgatagattgtcgcacctgattgcccgacattatcgcgagcccatttatacccatataaatcagcatccatgttggaatttaatcgcggcctcgagcaagacgtttcccgttgaatatggctcat

SEQ ID NO: 134 - DNA, 5300 bp, Artificial
  Synthetic
aacaccccttgtattactgtttatgtaagcagacagttttattgttcatgatgatatatttttatcttgtgcaatgtaacatcagagattttgagacacaacgtggctttccatcaaaaaaatattgacaacataaaaaactttgtgttatacttgtggaattgtgagcggataacaattctatatctgttattttttccaaccacagatctatggtgagcaagggcgaggagctgttcaccggggtggtgcccatcctggtcgagctggacggcgacgtaaacggccacaggttcagcgtgtccggcgagggcgagggcgatgccacctacggcaagctgaccctgaagctcatctgcaccaccggcaagctgcccgtgccctggcccaccctcgtgaccaccctgcaattcggcgtgctgtgcttcgcccgctaccccgaccacatgaagcagcacgacttcttcaagtccgccatgcccgaaggctacgtccaggagcgtaccatcttcttcaaggacgacggcaactacaagacccgcgccgaggtgaagttcgagggcgacaccctggtgaaccgcatcgagctgaagggcatcgacttcaaggaggacggcaacatcctggggcacaagctggagtacaacgggataagctcaaacgtatatatcaccgccgacaagcagaagaacggcatcaaggcccacttcaagatccgccacaacatcgaggacggcggcgtgcagctcgccgaccactaccagcagaacacccccatcggcgacggccccgtgctgctgcccgacaaccactacctgagcgtccagtccaagctgagcaaagaccccaacgagaagcgcgatcacatggtcctgctggagtccgtgaccgccgccgggatcactctcggcatggacgagctgtacaagtaagtcgaccggctgctaacaaagcccgcggccgctgaagatcgatctcgacgagtgagagaagattttcagcctgatacagattaaatcagaacgcagaagcggtctgataaaacagaatttgcctggcggcagtagcgcggtggtcccacctgaccccatgccgaactcagaagtgaaacgccgtagcgccgatggtagtgtggggtcaccccatgcgagagtagggaactgccaggcatcaaataaaacgaaaggctcagtcgaaagactgggcctttcgttttatctgttgtttgtcggtgaacgctctcctgagtaggacaaatccgccgggagcggatttgaacgttgcgaagcaacggcccggagggtggcgggcaggacgcccgccataaactgccaggcatcaaattaagcagaaggccatcctgacggatggcctttttgcgtttctacagagcgtcagaccccttaataagatgatcttcttgagatcgttttggtctgcgcgtaatctcttgctctgaaaacgaaaaaaccgccttgcagggcggtttttcgaaggttctctgagctaccaactctttgaaccgaggtaactggcttggaggagcgcagtcaccaaaacttgtcctttcagtttagccttaaccggcgcatgacttcaagactaactcctctaaatcaattaccagtggctgctgccagtggtgcttttgcatgtctttccgggttggactcaagacgatagttaccggataaggcgcagcggtcggactgaacggggggttcgtgcatacagtccagcttggagcgaactgcctacccggaactgagtgtcaggcgtggaatgagacaaacgcggccataacagcggaatgacaccggtaaaccgaaaggcaggaacaggagagcgcacgagggagccgccagggggaaacgcctggtatctttatagtcctgtcgggtttcgccaccactgatttgagcgtcagatttcgtgatgcttgtcaggggggcggagcctatggaaaaacggctttgccgcggccctctcggatctgtatggtgcactctcagtacaatctgctctgatgccgcatagttaagccagtatacactccgctatcgctacgtgactgcctcgacctgcagcaattccaacgccatcaaaaataattcgcgtctggccttcctgtagccagctttcatcaacattaaatgtgagcgagtaacaacccgtcggattctccgtgggaacaaacggcggattgaccgtaatgggataggtcacgttggtgtagatgggcgcatcgtaaccgtgcatctgccagtttgaggggacgacgacagtatcggcctcaggaagatcgcactccagccagctttccggcaccgcttctggtgccggaaaccaggcaaagcgccattcgccattcaggctgcgcaactgttgggaagggcgatcggtgcgggcctcttcgctattacgccagctggcgaaagggggatgtgctgcaaggcgattaagttgggtaacgccagggttttcccagtcacgacgttgtaaaacgacggccagtgaatccgtaatcatggtcatagctgtttcctgtgtgaaattgttatccgctcacaattccacacaacatacgagccggaagcataaagtgtaaagcctggggtgcctaatgagtgagctaacttacattaattgcgttgcgctcactgcccgctttccagtcgggaaacctgtcgtgccagctgcattaatgaatcggccaacgcgcggggagaggcggtttgcgtattgggcgccagggtggtttttcttttcaccagtgagacgggcaacagctgattgcccttcaccgcctggccctgagagagttgcagcaagcggtccacgctggtttgccccagcaggcgaaaatcctgtttgatggtggttaacggcgggatataacatgagctgtcttcggtatcgtcgtatcccactaccgagatatccgcaccaacgcgcagcccggactcggtaatggcgcgcattgcgcccagcgccatctgatcgttggcaaccagcatcgcagtgggaacgatgccctcattcagcatttgcatggtttgttgaaaaccggacatggcactccagtcgccttcccgttccgctatcggctgaatttgattgcgagtgagatatttatgccagccagccagacgcagacgcgccgagacagaacttaatgggcccgctaacagcgcgatttgctggtgacccaatgcgaccagatgctccacgcccagtcgcgtaccgtcttcatgggagaaaataatactgttgatgggtgtctggtcagagacatcaagaaataacgccggaacattagtgcaggcagcttccacagcaatggcatcctggtcatccagcggatagttaatgatcagcccactgacgcgttgcgcgagaagattgtgcaccgccgctttacaggcttcgacgccgcttcgttctaccatcgacaccaccacgctggcacccagttgatcggcgcgagatttaatcgccgcgacaatttgcgacggcgcgtgcagggccagactggaggtggcaacgccaatcagcaacgactgtttgcccgccagttgttgtgccacgcggttgggaatgtaattcagctccgccatcgccgcttccactttttcccgcgttttcgcagaaacgtggctggcctggttcaccacgcgggaaacggtctgataagagacaccggcatactctgcgacatcgtataacgttactggtttcacattcaccaccctgaattgactctcttccgggcgctatcatgccataccgcgaaaggttttgcaccattccatggtgtcggaattgctgcaggtcgagggggtcatggctgcgccccgacacccgccaacacccgctgacgcgccctgacgggcttgtctgctcccggcatccgcttacagacaagctgtgaccgtctccgggagctgcatgtgtcagaggttttcaccgtcatcaccgaaacgcgcgaggcaggatggcgcccaacagtcccccggccacggggcctgccaccatacccacgccgaaacaagcgctcatgagcccgaagtggcgagcccgatcttccccatcggtgatgtcggcgatataggcgccagcaaccgcacctgtggcgccggtgatgccggccacgatgcgtccggcgtagaggatccgtcgacctgcaggggggggggggcgctgaggtctgcctcgtgaagaaggtgttgctgactcataccaggcctgaatcgccccatcatccagccagaaagtgagggagccacggttgatgagagctttgttgtaggtggaccagttggtgattttgaacttttgctttgccacggaacggtctgcgttgtcgggaagatgcgtgatctgatccttcaactcagcaaaagttcgatttattcaacaaagccgccgtcccgtcaagtcagcgtaatgctctgccagtgttacaaccaattaaccaattctgattagaaaaactcatcgagcatcaaatgaaactgcaatttattcatatcaggattatcaataccatatttttgaaaaagccgtttctgtaatgaaggagaaaactcaccgaggcagttccataggatggcaagatcctggtatcggtctgcgattccgactcgtccaacatcaatacaacctattaatttcccctcgtcaaaaataaggttatcaagtgagaaatcaccatgagtgacgactgaatccggtgagaatggcaaaagcttatgcatttctttccagacttgttcaacaggccagccattacgctcgtcatcaaaatcactcgcatcaaccaaaccgttattcattcgtgattgcgcctgagcgagacgaaatacgcgatcgctgttaaaaggacaattacaaacaggaatcgaatgcaaccggcgcaggaacactgccagcgcatcaacaatattttcacctgaatcaggatattcttctaatacctggaatgctgttttcccggggatcgcagtggtgagtaaccatgcatcatcaggagtacggataaaatgcttgatggtcggaagaggcataaattccgtcagccagtttagtctgaccatctcatctgtaacatcattggcaacgctacctttgccatgtttcagaaacaactctggcgcatcgggcttcccatacaatcgatagattgtcgcacctgattgcccgacattatcgcgagcccatttatacccatataaatcagcatccatgttggaatttaatcgcggcctcgagcaagacgtttcccgttgaatatggctcat

SEQ ID NO: 135 - DNA, 5327 bp, Artificial
  Synthetic
aacaccccttgtattactgtttatgtaagcagacagttttattgttcatgatgatatatttttatcttgtgcaatgtaacatcagagattttgagacacaacgtggctttccatcaaaaaaatattgacaacataaaaaactttgtgttatacttgtggaattgtgagcggataacaattctatatctgttattttttccaaccacagatctatgagcaaaggtgaagaactgtttaccggcgtgagcaagggcgaggagctgttcaccggggtggtgcccatcctggtcgagctggacggcgacgtaaacggccacaggttcagcgtgtccggcgagggcgagggcgatgccacctacggcaagctgaccctgaagctcatctgcaccaccggcaagctgcccgtgccctggcccaccctcgtgaccaccctgcaattcggcgtgctgtgcttcgcccgctaccccgaccacatgaagcagcacgacttcttcaagtccgccatgcccgaaggctacgtccaggagcgtaccatcttcttcaaggacgacggcaactacaagacccgcgccgaggtgaagttcgagggcgacaccctggtgaaccgcatcgagctgaagggcatcgacttcaaggaggacggcaacatcctggggcacaagctggagtacaacgggataagctcaaacgtatatatcaccgccgacaagcagaagaacggcatcaaggcccacttcaagatccgccacaacatcgaggacggcggcgtgcagctcgccgaccactaccagcagaacacccccatcggcgacggccccgtgctgctgcccgacaaccactacctgagcgtccagtccaagctgagcaaagaccccaacgagaagcgcgatcacatggtcctgctggagtccgtgaccgccgccgggatcactctcggcatggacgagctgtacaagtaagtcgaccggctgctaacaaagcccgcggccgctgaagatcgatctcgacgagtgagagaagattttcagcctgatacagattaaatcagaacgcagaagcggtctgataaaacagaatttgcctggcggcagtagcgcggtggtcccacctgaccccatgccgaactcagaagtgaaacgccgtagcgccgatggtagtgtggggtcaccccatgcgagagtagggaactgccaggcatcaaataaaacgaaaggctcagtcgaaagactgggcctttcgttttatctgttgtttgtcggtgaacgctctcctgagtaggacaaatccgccgggagcggatttgaacgttgcgaagcaacggcccggagggtggcgggcaggacgcccgccataaactgccaggcatcaaattaagcagaaggccatcctgacggatggcctttttgcgtttctacagagcgtcagaccccttaataagatgatcttcttgagatcgttttggtctgcgcgtaatctcttgctctgaaaacgaaaaaaccgccttgcagggcggtttttcgaaggttctctgagctaccaactctttgaaccgaggtaactggcttggaggagcgcagtcaccaaaacttgtcctttcagtttagccttaaccggcgcatgacttcaagactaactcctctaaatcaattaccagtggctgctgccagtggtgcttttgcatgtctttccgggttggactcaagacgatagttaccggataaggcgcagcggtcggactgaacggggggttcgtgcatacagtccagcttggagcgaactgcctacccggaactgagtgtcaggcgtggaatgagacaaacgcggccataacagcggaatgacaccggtaaaccgaaaggcaggaacaggagagcgcacgagggagccgccagggggaaacgcctggtatctttatagtcctgtcgggtttcgccaccactgatttgagcgtcagatttcgtgatgcttgtcaggggggcggagcctatggaaaaacggctttgccgcggccctctcggatctgtatggtgcactctcagtacaatctgctctgatgccgcatagttaagccagtatacactccgctatcgctacgtgactgcctcgacctgcagcaattccaacgccatcaaaaataattcgcgtctggccttcctgtagccagctttcatcaacattaaatgtgagcgagtaacaacccgtcggattctccgtgggaacaaacggcggattgaccgtaatgggataggtcacgttggtgtagatgggcgcatcgtaaccgtgcatctgccagtttgaggggacgacgacagtatcggcctcaggaagatcgcactccagccagctttccggcaccgcttctggtgccggaaaccaggcaaagcgccattcgccattcaggctgcgcaactgttgggaagggcgatcggtgcgggcctcttcgctattacgccagctggcgaaagggggatgtgctgcaaggcgattaagttgggtaacgccagggttttcccagtcacgacgttgtaaaacgacggccagtgaatccgtaatcatggtcatagctgtttcctgtgtgaaattgttatccgctcacaattccacacaacatacgagccggaagcataaagtgtaaagcctggggtgcctaatgagtgagctaacttacattaattgcgttgcgctcactgcccgctttccagtcgggaaacctgtcgtgccagctgcattaatgaatcggccaacgcgcggggagaggcggtttgcgtattgggcgccagggtggtttttcttttcaccagtgagacgggcaacagctgattgcccttcaccgcctggccctgagagagttgcagcaagcggtccacgctggtttgccccagcaggcgaaaatcctgtttgatggtggttaacggcgggatataacatgagctgtcttcggtatcgtcgtatcccactaccgagatatccgcaccaacgcgcagcccggactcggtaatggcgcgcattgcgcccagcgccatctgatcgttggcaaccagcatcgcagtgggaacgatgccctcattcagcatttgcatggtttgttgaaaaccggacatggcactccagtcgccttcccgttccgctatcggctgaatttgattgcgagtgagatatttatgccagccagccagacgcagacgcgccgagacagaacttaatgggcccgctaacagcgcgatttgctggtgacccaatgcgaccagatgctccacgcccagtcgcgtaccgtcttcatgggagaaaataatactgttgatgggtgtctggtcagagacatcaagaaataacgccggaacattagtgcaggcagcttccacagcaatggcatcctggtcatccagcggatagttaatgatcagcccactgacgcgttgcgcgagaagattgtgcaccgccgctttacaggcttcgacgccgcttcgttctaccatcgacaccaccacgctggcacccagttgatcggcgcgagatttaatcgccgcgacaatttgcgacggcgcgtgcagggccagactggaggtggcaacgccaatcagcaacgactgtttgcccgccagttgttgtgccacgcggttgggaatgtaattcagctccgccatcgccgcttccactttttcccgcgttttcgcagaaacgtggctggcctggttcaccacgcgggaaacggtctgataagagacaccggcatactctgcgacatcgtataacgttactggtttcacattcaccaccctgaattgactctcttccgggcgctatcatgccataccgcgaaaggttttgcaccattccatggtgtcggaattgctgcaggtcgagggggtcatggctgcgccccgacacccgccaacacccgctgacgcgccctgacgggcttgtctgctcccggcatccgcttacagacaagctgtgaccgtctccgggagctgcatgtgtcagaggttttcaccgtcatcaccgaaacgcgcgaggcaggatggcgcccaacagtcccccggccacggggcctgccaccatacccacgccgaaacaagcgctcatgagcccgaagtggcgagcccgatcttccccatcggtgatgtcggcgatataggcgccagcaaccgcacctgtggcgccggtgatgccggccacgatgcgtccggcgtagaggatccgtcgacctgcaggggggggggggcgctgaggtctgcctcgtgaagaaggtgttgctgactcataccaggcctgaatcgccccatcatccagccagaaagtgagggagccacggttgatgagagctttgttgtaggtggaccagttggtgattttgaacttttgctttgccacggaacggtctgcgttgtcgggaagatgcgtgatctgatccttcaactcagcaaaagttcgatttattcaacaaagccgccgtcccgtcaagtcagcgtaatgctctgccagtgttacaaccaattaaccaattctgattagaaaaactcatcgagcatcaaatgaaactgcaatttattcatatcaggattatcaataccatatttttgaaaaagccgtttctgtaatgaaggagaaaactcaccgaggcagttccataggatggcaagatcctggtatcggtctgcgattccgactcgtccaacatcaatacaacctattaatttcccctcgtcaaaaataaggttatcaagtgagaaatcaccatgagtgacgactgaatccggtgagaatggcaaaagcttatgcatttctttccagacttgttcaacaggccagccattacgctcgtcatcaaaatcactcgcatcaaccaaaccgttattcattcgtgattgcgcctgagcgagacgaaatacgcgatcgctgttaaaaggacaattacaaacaggaatcgaatgcaaccggcgcaggaacactgccagcgcatcaacaatattttcacctgaatcaggatattcttctaatacctggaatgctgttttcccggggatcgcagtggtgagtaaccatgcatcatcaggagtacggataaaatgcttgatggtcggaagaggcataaattccgtcagccagtttagtctgaccatctcatctgtaacatcattggcaacgctacctttgccatgtttcagaaacaactctggcgcatcgggcttcccatacaatcgatagattgtcgcacctgattgcccgacattatcgcgagcccatttatacccatataaatcagcatccatgttggaatttaatcgcggcctcgagcaagacgtttcccgttgaatatggctcat

SEQ ID NO: 136 - DNA, 5309 bp, Artificial
  Synthetic
aacaccccttgtattactgtttatgtaagcagacagttttattgttcatgatgatatatttttatcttgtgcaatgtaacatcagagattttgagacacaacgtggctttccatcaaaaaaatattgacaacataaaaaactttgtgttatacttgtggaattgtgagcggataacaattctatatctgttattttttccaaccacagatctatgagcaaaggtgaagaactgtttaccggcagcgagctgattaaggagaacatgcacatgaagctgtacatggagggcaccgtggacaaccatcacttcaagtgcacatccgagggcgaaggcaagccctacgagggcacccagaccatgagaatcaaggtggtcgagggcggccctctccccttcgccttcgacatcctggctactagcttcctctacggcagcaagaccttcatcaaccacacccagggcatccccgacttcttcaagcagtccttccctgagggcttcacatgggagagagtcaccacatacgaagacgggggcgtgctgaccgctacccaggacaccagcctccaggacggctgcctcatctacaacgtcaagatcagaggggtgaacttcacatccaacggccctgtgatgcagaagaaaacactcggctgggaggccttcaccgagacgctgtaccccgctgacggcggcctggaaggcagaaacgacatggccctgaagctcgtgggcgggagccatctgatcgcaaacgccaagaccacatatagatccaagaaacccgctaagaacctcaagatgcctggcgtctactatgtggactacagactggaaagaatcaaggaggccaacaacgagacctacgtcgagcagcacgaggtggcagtggccagatactgcgacctccctagcaaactggggcacaagcttaattaagtcgaccggctgctaacaaagcccgcggccgctgaagatcgatctcgacgagtgagagaagattttcagcctgatacagattaaatcagaacgcagaagcggtctgataaaacagaatttgcctggcggcagtagcgcggtggtcccacctgaccccatgccgaactcagaagtgaaacgccgtagcgccgatggtagtgtggggtcaccccatgcgagagtagggaactgccaggcatcaaataaaacgaaaggctcagtcgaaagactgggcctttcgttttatctgttgtttgtcggtgaacgctctcctgagtaggacaaatccgccgggagcggatttgaacgttgcgaagcaacggcccggagggtggcgggcaggacgcccgccataaactgccaggcatcaaattaagcagaaggccatcctgacggatggcctttttgcgtttctacagagcgtcagaccccttaataagatgatcttcttgagatcgttttggtctgcgcgtaatctcttgctctgaaaacgaaaaaaccgccttgcagggcggtttttcgaaggttctctgagctaccaactctttgaaccgaggtaactggcttggaggagcgcagtcaccaaaacttgtcctttcagtttagccttaaccggcgcatgacttcaagactaactcctctaaatcaattaccagtggctgctgccagtggtgcttttgcatgtctttccgggttggactcaagacgatagttaccggataaggcgcagcggtcggactgaacggggggttcgtgcatacagtccagcttggagcgaactgcctacccggaactgagtgtcaggcgtggaatgagacaaacgcggccataacagcggaatgacaccggtaaaccgaaaggcaggaacaggagagcgcacgagggagccgccagggggaaacgcctggtatctttatagtcctgtcgggtttcgccaccactgatttgagcgtcagatttcgtgatgcttgtcaggggggcggagcctatggaaaaacggctttgccgcggccctctcggatctgtatggtgcactctcagtacaatctgctctgatgccgcatagttaagccagtatacactccgctatcgctacgtgactgcctcgacctgcagcaattccaacgccatcaaaaataattcgcgtctggccttcctgtagccagctttcatcaacattaaatgtgagcgagtaacaacccgtcggattctccgtgggaacaaacggcggattgaccgtaatgggataggtcacgttggtgtagatgggcgcatcgtaaccgtgcatctgccagtttgaggggacgacgacagtatcggcctcaggaagatcgcactccagccagctttccggcaccgcttctggtgccggaaaccaggcaaagcgccattcgccattcaggctgcgcaactgttgggaagggcgatcggtgcgggcctcttcgctattacgccagctggcgaaagggggatgtgctgcaaggcgattaagttgggtaacgccagggttttcccagtcacgacgttgtaaaacgacggccagtgaatccgtaatcatggtcatagctgtttcctgtgtgaaattgttatccgctcacaattccacacaacatacgagccggaagcataaagtgtaaagcctggggtgcctaatgagtgagctaacttacattaattgcgttgcgctcactgcccgctttccagtcgggaaacctgtcgtgccagctgcattaatgaatcggccaacgcgcggggagaggcggtttgcgtattgggcgccagggtggtttttcttttcaccagtgagacgggcaacagctgattgcccttcaccgcctggccctgagagagttgcagcaagcggtccacgctggtttgccccagcaggcgaaaatcctgtttgatggtggttaacggcgggatataacatgagctgtcttcggtatcgtcgtatcccactaccgagatatccgcaccaacgcgcagcccggactcggtaatggcgcgcattgcgcccagcgccatctgatcgttggcaaccagcatcgcagtgggaacgatgccctcattcagcatttgcatggtttgttgaaaaccggacatggcactccagtcgccttcccgttccgctatcggctgaatttgattgcgagtgagatatttatgccagccagccagacgcagacgcgccgagacagaacttaatgggcccgctaacagcgcgatttgctggtgacccaatgcgaccagatgctccacgcccagtcgcgtaccgtcttcatgggagaaaataatactgttgatgggtgtctggtcagagacatcaagaaataacgccggaacattagtgcaggcagcttccacagcaatggcatcctggtcatccagcggatagttaatgatcagcccactgacgcgttgcgcgagaagattgtgcaccgccgctttacaggcttcgacgccgcttcgttctaccatcgacaccaccacgctggcacccagttgatcggcgcgagatttaatcgccgcgacaatttgcgacggcgcgtgcagggccagactggaggtggcaacgccaatcagcaacgactgtttgcccgccagttgttgtgccacgcggttgggaatgtaattcagctccgccatcgccgcttccactttttcccgcgttttcgcagaaacgtggctggcctggttcaccacgcgggaaacggtctgataagagacaccggcatactctgcgacatcgtataacgttactggtttcacattcaccaccctgaattgactctcttccgggcgctatcatgccataccgcgaaaggttttgcaccattccatggtgtcggaattgctgcaggtcgagggggtcatggctgcgccccgacacccgccaacacccgctgacgcgccctgacgggcttgtctgctcccggcatccgcttacagacaagctgtgaccgtctccgggagctgcatgtgtcagaggttttcaccgtcatcaccgaaacgcgcgaggcaggatggcgcccaacagtcccccggccacggggcctgccaccatacccacgccgaaacaagcgctcatgagcccgaagtggcgagcccgatcttccccatcggtgatgtcggcgatataggcgccagcaaccgcacctgtggcgccggtgatgccggccacgatgcgtccggcgtagaggatccgtcgacctgcaggggggggggggcgctgaggtctgcctcgtgaagaaggtgttgctgactcataccaggcctgaatcgccccatcatccagccagaaagtgagggagccacggttgatgagagctttgttgtaggtggaccagttggtgattttgaacttttgctttgccacggaacggtctgcgttgtcgggaagatgcgtgatctgatccttcaactcagcaaaagttcgatttattcaacaaagccgccgtcccgtcaagtcagcgtaatgctctgccagtgttacaaccaattaaccaattctgattagaaaaactcatcgagcatcaaatgaaactgcaatttattcatatcaggattatcaataccatatttttgaaaaagccgtttctgtaatgaaggagaaaactcaccgaggcagttccataggatggcaagatcctggtatcggtctgcgattccgactcgtccaacatcaatacaacctattaatttcccctcgtcaaaaataaggttatcaagtgagaaatcaccatgagtgacgactgaatccggtgagaatggcaaaagcttatgcatttctttccagacttgttcaacaggccagccattacgctcgtcatcaaaatcactcgcatcaaccaaaccgttattcattcgtgattgcgcctgagcgagacgaaatacgcgatcgctgttaaaaggacaattacaaacaggaatcgaatgcaaccggcgcaggaacactgccagcgcatcaacaatattttcacctgaatcaggatattcttctaatacctggaatgctgttttcccggggatcgcagtggtgagtaaccatgcatcatcaggagtacggataaaatgcttgatggtcggaagaggcataaattccgtcagccagtttagtctgaccatctcatctgtaacatcattggcaacgctacctttgccatgtttcagaaacaactctggcgcatcgggcttcccatacaatcgatagattgtcgcacctgattgcccgacattatcgcgagcccatttatacccatataaatcagcatccatgttggaatttaatcgcggcctcgagcaagacgtttcccgttgaatatggctcat

SEQ ID NO: 137 - DNA, 5297 bp, Artificial
  Synthetic
aacaccccttgtattactgtttatgtaagcagacagttttattgttcatgatgatatatttttatcttgtgcaatgtaacatcagagattttgagacacaacgtggctttccatcaaaaaaatattgacaacataaaaaactttgtgttatacttgtggaattgtgagcggataacaattctatatctgttattttttccaaccacagatctatgagtaaaggagaagaacttttcactggagttgtcccaattcttgttgaattagatggtgatgttaatgggcacaaattttctgtcagtggagagggtgaaggtgatgcaacatacggaaaacttacccttaaatttatttgcactactggaaaactacctgttccatggccaacacttgtcactactctcacttggggtgttcaatgctttgcaagatacccagatcatatgaaacagcatgactttttcaagagtgccatgcccgaaggttatgtacaggaaagaactatatttttcaaagatgacgggaactacaagacacgtgctgaagtcaagtttgaaggtgatacccttgttaatagaatcgagttaaaaggtattgattttaaagaagatggaaacattcttggacacaaattggaatacaacgctatctcagacaatgtatacatcacggcagacaaacaaaagaatggaatcaaagctaacttcaaaattagacacaacattgaagatggaagcgttcaactagcagaccattatcaacaaaatactccaattggcgatggccctgtccttttaccagacaaccattacctgtccacacaatctaagctttcgaaagatcccaacgaaaagagagaccacatggtccttcttgagtttgtaacagctgctgggattacacatggcatggatgaactatacaaataagtcgaccggctgctaacaaagcccgcggccgctgaagatcgatctcgacgagtgagagaagattttcagcctgatacagattaaatcagaacgcagaagcggtctgataaaacagaatttgcctggcggcagtagcgcggtggtcccacctgaccccatgccgaactcagaagtgaaacgccgtagcgccgatggtagtgtggggtcaccccatgcgagagtagggaactgccaggcatcaaataaaacgaaaggctcagtcgaaagactgggcctttcgttttatctgttgtttgtcggtgaacgctctcctgagtaggacaaatccgccgggagcggatttgaacgttgcgaagcaacggcccggagggtggcgggcaggacgcccgccataaactgccaggcatcaaattaagcagaaggccatcctgacggatggcctttttgcgtttctacagagcgtcagaccccttaataagatgatcttcttgagatcgttttggtctgcgcgtaatctcttgctctgaaaacgaaaaaaccgccttgcagggcggtttttcgaaggttctctgagctaccaactctttgaaccgaggtaactggcttggaggagcgcagtcaccaaaacttgtcctttcagtttagccttaaccggcgcatgacttcaagactaactcctctaaatcaattaccagtggctgctgccagtggtgcttttgcatgtctttccgggttggactcaagacgatagttaccggataaggcgcagcggtcggactgaacggggggttcgtgcatacagtccagcttggagcgaactgcctacccggaactgagtgtcaggcgtggaatgagacaaacgcggccataacagcggaatgacaccggtaaaccgaaaggcaggaacaggagagcgcacgagggagccgccagggggaaacgcctggtatctttatagtcctgtcgggtttcgccaccactgatttgagcgtcagatttcgtgatgcttgtcaggggggcggagcctatggaaaaacggctttgccgcggccctctcggatctgtatggtgcactctcagtacaatctgctctgatgccgcatagttaagccagtatacactccgctatcgctacgtgactgcctcgacctgcagcaattccaacgccatcaaaaataattcgcgtctggccttcctgtagccagctttcatcaacattaaatgtgagcgagtaacaacccgtcggattctccgtgggaacaaacggcggattgaccgtaatgggataggtcacgttggtgtagatgggcgcatcgtaaccgtgcatctgccagtttgaggggacgacgacagtatcggcctcaggaagatcgcactccagccagctttccggcaccgcttctggtgccggaaaccaggcaaagcgccattcgccattcaggctgcgcaactgttgggaagggcgatcggtgcgggcctcttcgctattacgccagctggcgaaagggggatgtgctgcaaggcgattaagttgggtaacgccagggttttcccagtcacgacgttgtaaaacgacggccagtgaatccgtaatcatggtcatagctgtttcctgtgtgaaattgttatccgctcacaattccacacaacatacgagccggaagcataaagtgtaaagcctggggtgcctaatgagtgagctaacttacattaattgcgttgcgctcactgcccgctttccagtcgggaaacctgtcgtgccagctgcattaatgaatcggccaacgcgcggggagaggcggtttgcgtattgggcgccagggtggtttttcttttcaccagtgagacgggcaacagctgattgcccttcaccgcctggccctgagagagttgcagcaagcggtccacgctggtttgccccagcaggcgaaaatcctgtttgatggtggttaacggcgggatataacatgagctgtcttcggtatcgtcgtatcccactaccgagatatccgcaccaacgcgcagcccggactcggtaatggcgcgcattgcgcccagcgccatctgatcgttggcaaccagcatcgcagtgggaacgatgccctcattcagcatttgcatggtttgttgaaaaccggacatggcactccagtcgccttcccgttccgctatcggctgaatttgattgcgagtgagatatttatgccagccagccagacgcagacgcgccgagacagaacttaatgggcccgctaacagcgcgatttgctggtgacccaatgcgaccagatgctccacgcccagtcgcgtaccgtcttcatgggagaaaataatactgttgatgggtgtctggtcagagacatcaagaaataacgccggaacattagtgcaggcagcttccacagcaatggcatcctggtcatccagcggatagttaatgatcagcccactgacgcgttgcgcgagaagattgtgcaccgccgctttacaggcttcgacgccgcttcgttctaccatcgacaccaccacgctggcacccagttgatcggcgcgagatttaatcgccgcgacaatttgcgacggcgcgtgcagggccagactggaggtggcaacgccaatcagcaacgactgtttgcccgccagttgttgtgccacgcggttgggaatgtaattcagctccgccatcgccgcttccactttttcccgcgttttcgcagaaacgtggctggcctggttcaccacgcgggaaacggtctgataagagacaccggcatactctgcgacatcgtataacgttactggtttcacattcaccaccctgaattgactctcttccgggcgctatcatgccataccgcgaaaggttttgcaccattccatggtgtcggaattgctgcaggtcgagggggtcatggctgcgccccgacacccgccaacacccgctgacgcgccctgacgggcttgtctgctcccggcatccgcttacagacaagctgtgaccgtctccgggagctgcatgtgtcagaggttttcaccgtcatcaccgaaacgcgcgaggcaggatggcgcccaacagtcccccggccacggggcctgccaccatacccacgccgaaacaagcgctcatgagcccgaagtggcgagcccgatcttccccatcggtgatgtcggcgatataggcgccagcaaccgcacctgtggcgccggtgatgccggccacgatgcgtccggcgtagaggatccgtcgacctgcaggggggggggggcgctgaggtctgcctcgtgaagaaggtgttgctgactcataccaggcctgaatcgccccatcatccagccagaaagtgagggagccacggttgatgagagctttgttgtaggtggaccagttggtgattttgaacttttgctttgccacggaacggtctgcgttgtcgggaagatgcgtgatctgatccttcaactcagcaaaagttcgatttattcaacaaagccgccgtcccgtcaagtcagcgtaatgctctgccagtgttacaaccaattaaccaattctgattagaaaaactcatcgagcatcaaatgaaactgcaatttattcatatcaggattatcaataccatatttttgaaaaagccgtttctgtaatgaaggagaaaactcaccgaggcagttccataggatggcaagatcctggtatcggtctgcgattccgactcgtccaacatcaatacaacctattaatttcccctcgtcaaaaataaggttatcaagtgagaaatcaccatgagtgacgactgaatccggtgagaatggcaaaagcttatgcatttctttccagacttgttcaacaggccagccattacgctcgtcatcaaaatcactcgcatcaaccaaaccgttattcattcgtgattgcgcctgagcgagacgaaatacgcgatcgctgttaaaaggacaattacaaacaggaatcgaatgcaaccggcgcaggaacactgccagcgcatcaacaatattttcacctgaatcaggatattcttctaatacctggaatgctgttttcccggggatcgcagtggtgagtaaccatgcatcatcaggagtacggataaaatgcttgatggtcggaagaggcataaattccgtcagccagtttagtctgaccatctcatctgtaacatcattggcaacgctacctttgccatgtttcagaaacaactctggcgcatcgggcttcccatacaatcgatagattgtcgcacctgattgcccgacattatcgcgagcccatttatacccatataaatcagcatccatgttggaatttaatcgcggcctcgagcaagacgtttcccgttgaatatggctcat

SEQ ID NO: 138 - DNA, 5324 bp, Artificial
  Synthetic
aacaccccttgtattactgtttatgtaagcagacagttttattgttcatgatgatatatttttatcttgtgcaatgtaacatcagagattttgagacacaacgtggctttccatcaaaaaaatattgacaacataaaaaactttgtgttatacttgtggaattgtgagcggataacaattctatatctgttattttttccaaccacagatctatgagcaaaggtgaagaactgtttaccggcagtaaaggagaagaacttttcactggagttgtcccaattcttgttgaattagatggtgatgttaatgggcacaaattttctgtcagtggagagggtgaaggtgatgcaacatacggaaaacttacccttaaatttatttgcactactggaaaactacctgttccatggccaacacttgtcactactctcacttggggtgttcaatgctttgcaagatacccagatcatatgaaacagcatgactttttcaagagtgccatgcccgaaggttatgtacaggaaagaactatatttttcaaagatgacgggaactacaagacacgtgctgaagtcaagtttgaaggtgatacccttgttaatagaatcgagttaaaaggtattgattttaaagaagatggaaacattcttggacacaaattggaatacaacgctatctcagacaatgtatacatcacggcagacaaacaaaagaatggaatcaaagctaacttcaaaattagacacaacattgaagatggaagcgttcaactagcagaccattatcaacaaaatactccaattggcgatggccctgtccttttaccagacaaccattacctgtccacacaatctaagctttcgaaagatcccaacgaaaagagagaccacatggtccttcttgagtttgtaacagctgctgggattacacatggcatggatgaactatacaaataagtcgaccggctgctaacaaagcccgcggccgctgaagatcgatctcgacgagtgagagaagattttcagcctgatacagattaaatcagaacgcagaagcggtctgataaaacagaatttgcctggcggcagtagcgcggtggtcccacctgaccccatgccgaactcagaagtgaaacgccgtagcgccgatggtagtgtggggtcaccccatgcgagagtagggaactgccaggcatcaaataaaacgaaaggctcagtcgaaagactgggcctttcgttttatctgttgtttgtcggtgaacgctctcctgagtaggacaaatccgccgggagcggatttgaacgttgcgaagcaacggcccggagggtggcgggcaggacgcccgccataaactgccaggcatcaaattaagcagaaggccatcctgacggatggcctttttgcgtttctacagagcgtcagaccccttaataagatgatcttcttgagatcgttttggtctgcgcgtaatctcttgctctgaaaacgaaaaaaccgccttgcagggcggtttttcgaaggttctctgagctaccaactctttgaaccgaggtaactggcttggaggagcgcagtcaccaaaacttgtcctttcagtttagccttaaccggcgcatgacttcaagactaactcctctaaatcaattaccagtggctgctgccagtggtgcttttgcatgtctttccgggttggactcaagacgatagttaccggataaggcgcagcggtcggactgaacggggggttcgtgcatacagtccagcttggagcgaactgcctacccggaactgagtgtcaggcgtggaatgagacaaacgcggccataacagcggaatgacaccggtaaaccgaaaggcaggaacaggagagcgcacgagggagccgccagggggaaacgcctggtatctttatagtcctgtcgggtttcgccaccactgatttgagcgtcagatttcgtgatgcttgtcaggggggcggagcctatggaaaaacggctttgccgcggccctctcggatctgtatggtgcactctcagtacaatctgctctgatgccgcatagttaagccagtatacactccgctatcgctacgtgactgcctcgacctgcagcaattccaacgccatcaaaaataattcgcgtctggccttcctgtagccagctttcatcaacattaaatgtgagcgagtaacaacccgtcggattctccgtgggaacaaacggcggattgaccgtaatgggataggtcacgttggtgtagatgggcgcatcgtaaccgtgcatctgccagtttgaggggacgacgacagtatcggcctcaggaagatcgcactccagccagctttccggcaccgcttctggtgccggaaaccaggcaaagcgccattcgccattcaggctgcgcaactgttgggaagggcgatcggtgcgggcctcttcgctattacgccagctggcgaaagggggatgtgctgcaaggcgattaagttgggtaacgccagggttttcccagtcacgacgttgtaaaacgacggccagtgaatccgtaatcatggtcatagctgtttcctgtgtgaaattgttatccgctcacaattccacacaacatacgagccggaagcataaagtgtaaagcctggggtgcctaatgagtgagctaacttacattaattgcgttgcgctcactgcccgctttccagtcgggaaacctgtcgtgccagctgcattaatgaatcggccaacgcgcggggagaggcggtttgcgtattgggcgccagggtggtttttcttttcaccagtgagacgggcaacagctgattgcccttcaccgcctggccctgagagagttgcagcaagcggtccacgctggtttgccccagcaggcgaaaatcctgtttgatggtggttaacggcgggatataacatgagctgtcttcggtatcgtcgtatcccactaccgagatatccgcaccaacgcgcagcccggactcggtaatggcgcgcattgcgcccagcgccatctgatcgttggcaaccagcatcgcagtgggaacgatgccctcattcagcatttgcatggtttgttgaaaaccggacatggcactccagtcgccttcccgttccgctatcggctgaatttgattgcgagtgagatatttatgccagccagccagacgcagacgcgccgagacagaacttaatgggcccgctaacagcgcgatttgctggtgacccaatgcgaccagatgctccacgcccagtcgcgtaccgtcttcatgggagaaaataatactgttgatgggtgtctggtcagagacatcaagaaataacgccggaacattagtgcaggcagcttccacagcaatggcatcctggtcatccagcggatagttaatgatcagcccactgacgcgttgcgcgagaagattgtgcaccgccgctttacaggcttcgacgccgcttcgttctaccatcgacaccaccacgctggcacccagttgatcggcgcgagatttaatcgccgcgacaatttgcgacggcgcgtgcagggccagactggaggtggcaacgccaatcagcaacgactgtttgcccgccagttgttgtgccacgcggttgggaatgtaattcagctccgccatcgccgcttccactttttcccgcgttttcgcagaaacgtggctggcctggttcaccacgcgggaaacggtctgataagagacaccggcatactctgcgacatcgtataacgttactggtttcacattcaccaccctgaattgactctcttccgggcgctatcatgccataccgcgaaaggttttgcaccattccatggtgtcggaattgctgcaggtcgagggggtcatggctgcgccccgacacccgccaacacccgctgacgcgccctgacgggcttgtctgctcccggcatccgcttacagacaagctgtgaccgtctccgggagctgcatgtgtcagaggttttcaccgtcatcaccgaaacgcgcgaggcaggatggcgcccaacagtcccccggccacggggcctgccaccatacccacgccgaaacaagcgctcatgagcccgaagtggcgagcccgatcttccccatcggtgatgtcggcgatataggcgccagcaaccgcacctgtggcgccggtgatgccggccacgatgcgtccggcgtagaggatccgtcgacctgcaggggggggggggcgctgaggtctgcctcgtgaagaaggtgttgctgactcataccaggcctgaatcgccccatcatccagccagaaagtgagggagccacggttgatgagagctttgttgtaggtggaccagttggtgattttgaacttttgctttgccacggaacggtctgcgttgtcgggaagatgcgtgatctgatccttcaactcagcaaaagttcgatttattcaacaaagccgccgtcccgtcaagtcagcgtaatgctctgccagtgttacaaccaattaaccaattctgattagaaaaactcatcgagcatcaaatgaaactgcaatttattcatatcaggattatcaataccatatttttgaaaaagccgtttctgtaatgaaggagaaaactcaccgaggcagttccataggatggcaagatcctggtatcggtctgcgattccgactcgtccaacatcaatacaacctattaatttcccctcgtcaaaaataaggttatcaagtgagaaatcaccatgagtgacgactgaatccggtgagaatggcaaaagcttatgcatttctttccagacttgttcaacaggccagccattacgctcgtcatcaaaatcactcgcatcaaccaaaccgttattcattcgtgattgcgcctgagcgagacgaaatacgcgatcgctgttaaaaggacaattacaaacaggaatcgaatgcaaccggcgcaggaacactgccagcgcatcaacaatattttcacctgaatcaggatattcttctaatacctggaatgctgttttcccggggatcgcagtggtgagtaaccatgcatcatcaggagtacggataaaatgcttgatggtcggaagaggcataaattccgtcagccagtttagtctgaccatctcatctgtaacatcattggcaacgctacctttgccatgtttcagaaacaactctggcgcatcgggcttcccatacaatcgatagattgtcgcacctgattgcccgacattatcgcgagcccatttatacccatataaatcagcatccatgttggaatttaatcgcggcctcgagcaagacgtttcccgttgaatatggctcat

SEQ ID NO: 139 - DNA, 5297 bp, Artificial
  Synthetic
aacaccccttgtattactgtttatgtaagcagacagttttattgttcatgatgatatatttttatcttgtgcaatgtaacatcagagattttgagacacaacgtggctttccatcaaaaaaatattgacaacataaaaaactttgtgttatacttgtggaattgtgagcggataacaattctatatctgttattttttccaaccacagatctatgagtaaaggagaagaacttttcactggagttgtcccaattcttgttgaattagatggtgatgttaatgggcacaaattttctgtcagtggagagggtgaaggtgatgcaacatacggaaaacttacccttaaatttatttgcactactggaaaactacctgttccatggccaacacttgtcactactttctcttatggtgttcaatgctttgcgagatacccagatcatatgaaacagcatgactttttcaagagtgccatgcccgaaggttatgtacaggaaagaactatatttttcaaagatgacgggaactacaagacacgtgctgaagtcaagtttgaaggtgatacccttgttaatagaatcgagttaaaaggtattgattttaaagaagatggaaacattcttggacacaaattggaatacaactttaactcacacaatgtatacatcatggcagacaaacaaaagaatggaatcaaagttaacttcaaaattagacacaacattgaagatggaagcgttcaactagcagaccattatcaacaaaatactccaattggcgatggccctgtccttttaccagacaaccattacctgtccatacaatctgccctttcgaaagatcccaacgaaaagagagaccacatggtccttcttgagtttgtaacagctgctgggattacacatggcatggatgaactatacaaataagtcgaccggctgctaacaaagcccgcggccgctgaagatcgatctcgacgagtgagagaagattttcagcctgatacagattaaatcagaacgcagaagcggtctgataaaacagaatttgcctggcggcagtagcgcggtggtcccacctgaccccatgccgaactcagaagtgaaacgccgtagcgccgatggtagtgtggggtcaccccatgcgagagtagggaactgccaggcatcaaataaaacgaaaggctcagtcgaaagactgggcctttcgttttatctgttgtttgtcggtgaacgctctcctgagtaggacaaatccgccgggagcggatttgaacgttgcgaagcaacggcccggagggtggcgggcaggacgcccgccataaactgccaggcatcaaattaagcagaaggccatcctgacggatggcctttttgcgtttctacagagcgtcagaccccttaataagatgatcttcttgagatcgttttggtctgcgcgtaatctcttgctctgaaaacgaaaaaaccgccttgcagggcggtttttcgaaggttctctgagctaccaactctttgaaccgaggtaactggcttggaggagcgcagtcaccaaaacttgtcctttcagtttagccttaaccggcgcatgacttcaagactaactcctctaaatcaattaccagtggctgctgccagtggtgcttttgcatgtctttccgggttggactcaagacgatagttaccggataaggcgcagcggtcggactgaacggggggttcgtgcatacagtccagcttggagcgaactgcctacccggaactgagtgtcaggcgtggaatgagacaaacgcggccataacagcggaatgacaccggtaaaccgaaaggcaggaacaggagagcgcacgagggagccgccagggggaaacgcctggtatctttatagtcctgtcgggtttcgccaccactgatttgagcgtcagatttcgtgatgcttgtcaggggggcggagcctatggaaaaacggctttgccgcggccctctcggatctgtatggtgcactctcagtacaatctgctctgatgccgcatagttaagccagtatacactccgctatcgctacgtgactgcctcgacctgcagcaattccaacgccatcaaaaataattcgcgtctggccttcctgtagccagctttcatcaacattaaatgtgagcgagtaacaacccgtcggattctccgtgggaacaaacggcggattgaccgtaatgggataggtcacgttggtgtagatgggcgcatcgtaaccgtgcatctgccagtttgaggggacgacgacagtatcggcctcaggaagatcgcactccagccagctttccggcaccgcttctggtgccggaaaccaggcaaagcgccattcgccattcaggctgcgcaactgttgggaagggcgatcggtgcgggcctcttcgctattacgccagctggcgaaagggggatgtgctgcaaggcgattaagttgggtaacgccagggttttcccagtcacgacgttgtaaaacgacggccagtgaatccgtaatcatggtcatagctgtttcctgtgtgaaattgttatccgctcacaattccacacaacatacgagccggaagcataaagtgtaaagcctggggtgcctaatgagtgagctaacttacattaattgcgttgcgctcactgcccgctttccagtcgggaaacctgtcgtgccagctgcattaatgaatcggccaacgcgcggggagaggcggtttgcgtattgggcgccagggtggtttttcttttcaccagtgagacgggcaacagctgattgcccttcaccgcctggccctgagagagttgcagcaagcggtccacgctggtttgccccagcaggcgaaaatcctgtttgatggtggttaacggcgggatataacatgagctgtcttcggtatcgtcgtatcccactaccgagatatccgcaccaacgcgcagcccggactcggtaatggcgcgcattgcgcccagcgccatctgatcgttggcaaccagcatcgcagtgggaacgatgccctcattcagcatttgcatggtttgttgaaaaccggacatggcactccagtcgccttcccgttccgctatcggctgaatttgattgcgagtgagatatttatgccagccagccagacgcagacgcgccgagacagaacttaatgggcccgctaacagcgcgatttgctggtgacccaatgcgaccagatgctccacgcccagtcgcgtaccgtcttcatgggagaaaataatactgttgatgggtgtctggtcagagacatcaagaaataacgccggaacattagtgcaggcagcttccacagcaatggcatcctggtcatccagcggatagttaatgatcagcccactgacgcgttgcgcgagaagattgtgcaccgccgctttacaggcttcgacgccgcttcgttctaccatcgacaccaccacgctggcacccagttgatcggcgcgagatttaatcgccgcgacaatttgcgacggcgcgtgcagggccagactggaggtggcaacgccaatcagcaacgactgtttgcccgccagttgttgtgccacgcggttgggaatgtaattcagctccgccatcgccgcttccactttttcccgcgttttcgcagaaacgtggctggcctggttcaccacgcgggaaacggtctgataagagacaccggcatactctgcgacatcgtataacgttactggtttcacattcaccaccctgaattgactctcttccgggcgctatcatgccataccgcgaaaggttttgcaccattccatggtgtcggaattgctgcaggtcgagggggtcatggctgcgccccgacacccgccaacacccgctgacgcgccctgacgggcttgtctgctcccggcatccgcttacagacaagctgtgaccgtctccgggagctgcatgtgtcagaggttttcaccgtcatcaccgaaacgcgcgaggcaggatggcgcccaacagtcccccggccacggggcctgccaccatacccacgccgaaacaagcgctcatgagcccgaagtggcgagcccgatcttccccatcggtgatgtcggcgatataggcgccagcaaccgcacctgtggcgccggtgatgccggccacgatgcgtccggcgtagaggatccgtcgacctgcaggggggggggggcgctgaggtctgcctcgtgaagaaggtgttgctgactcataccaggcctgaatcgccccatcatccagccagaaagtgagggagccacggttgatgagagctttgttgtaggtggaccagttggtgattttgaacttttgctttgccacggaacggtctgcgttgtcgggaagatgcgtgatctgatccttcaactcagcaaaagttcgatttattcaacaaagccgccgtcccgtcaagtcagcgtaatgctctgccagtgttacaaccaattaaccaattctgattagaaaaactcatcgagcatcaaatgaaactgcaatttattcatatcaggattatcaataccatatttttgaaaaagccgtttctgtaatgaaggagaaaactcaccgaggcagttccataggatggcaagatcctggtatcggtctgcgattccgactcgtccaacatcaatacaacctattaatttcccctcgtcaaaaataaggttatcaagtgagaaatcaccatgagtgacgactgaatccggtgagaatggcaaaagcttatgcatttctttccagacttgttcaacaggccagccattacgctcgtcatcaaaatcactcgcatcaaccaaaccgttattcattcgtgattgcgcctgagcgagacgaaatacgcgatcgctgttaaaaggacaattacaaacaggaatcgaatgcaaccggcgcaggaacactgccagcgcatcaacaatattttcacctgaatcaggatattcttctaatacctggaatgctgttttcccggggatcgcagtggtgagtaaccatgcatcatcaggagtacggataaaatgcttgatggtcggaagaggcataaattccgtcagccagtttagtctgaccatctcatctgtaacatcattggcaacgctacctttgccatgtttcagaaacaactctggcgcatcgggcttcccatacaatcgatagattgtcgcacctgattgcccgacattatcgcgagcccatttatacccatataaatcagcatccatgttggaatttaatcgcggcctcgagcaagacgtttcccgttgaatatggctcat

SEQ ID NO: 140 - DNA, 5324 bp, Artificial
  Synthetic
aacaccccttgtattactgtttatgtaagcagacagttttattgttcatgatgatatatttttatcttgtgcaatgtaacatcagagattttgagacacaacgtggctttccatcaaaaaaatattgacaacataaaaaactttgtgttatacttgtggaattgtgagcggataacaattctatatctgttattttttccaaccacagatctatgagcaaaggtgaagaactgtttaccggcagtaaaggagaagaacttttcactggagttgtcccaattcttgttgaattagatggtgatgttaatgggcacaaattttctgtcagtggagagggtgaaggtgatgcaacatacggaaaacttacccttaaatttatttgcactactggaaaactacctgttccatggccaacacttgtcactactttctcttatggtgttcaatgctttgcgagatacccagatcatatgaaacagcatgactttttcaagagtgccatgcccgaaggttatgtacaggaaagaactatatttttcaaagatgacgggaactacaagacacgtgctgaagtcaagtttgaaggtgatacccttgttaatagaatcgagttaaaaggtattgattttaaagaagatggaaacattcttggacacaaattggaatacaactttaactcacacaatgtatacatcatggcagacaaacaaaagaatggaatcaaagttaacttcaaaattagacacaacattgaagatggaagcgttcaactagcagaccattatcaacaaaatactccaattggcgatggccctgtccttttaccagacaaccattacctgtccatacaatctgccctttcgaaagatcccaacgaaaagagagaccacatggtccttcttgagtttgtaacagctgctgggattacacatggcatggatgaactatacaaataagtcgaccggctgctaacaaagcccgcggccgctgaagatcgatctcgacgagtgagagaagattttcagcctgatacagattaaatcagaacgcagaagcggtctgataaaacagaatttgcctggcggcagtagcgcggtggtcccacctgaccccatgccgaactcagaagtgaaacgccgtagcgccgatggtagtgtggggtcaccccatgcgagagtagggaactgccaggcatcaaataaaacgaaaggctcagtcgaaagactgggcctttcgttttatctgttgtttgtcggtgaacgctctcctgagtaggacaaatccgccgggagcggatttgaacgttgcgaagcaacggcccggagggtggcgggcaggacgcccgccataaactgccaggcatcaaattaagcagaaggccatcctgacggatggcctttttgcgtttctacagagcgtcagaccccttaataagatgatcttcttgagatcgttttggtctgcgcgtaatctcttgctctgaaaacgaaaaaaccgccttgcagggcggtttttcgaaggttctctgagctaccaactctttgaaccgaggtaactggcttggaggagcgcagtcaccaaaacttgtcctttcagtttagccttaaccggcgcatgacttcaagactaactcctctaaatcaattaccagtggctgctgccagtggtgcttttgcatgtctttccgggttggactcaagacgatagttaccggataaggcgcagcggtcggactgaacggggggttcgtgcatacagtccagcttggagcgaactgcctacccggaactgagtgtcaggcgtggaatgagacaaacgcggccataacagcggaatgacaccggtaaaccgaaaggcaggaacaggagagcgcacgagggagccgccagggggaaacgcctggtatctttatagtcctgtcgggtttcgccaccactgatttgagcgtcagatttcgtgatgcttgtcaggggggcggagcctatggaaaaacggctttgccgcggccctctcggatctgtatggtgcactctcagtacaatctgctctgatgccgcatagttaagccagtatacactccgctatcgctacgtgactgcctcgacctgcagcaattccaacgccatcaaaaataattcgcgtctggccttcctgtagccagctttcatcaacattaaatgtgagcgagtaacaacccgtcggattctccgtgggaacaaacggcggattgaccgtaatgggataggtcacgttggtgtagatgggcgcatcgtaaccgtgcatctgccagtttgaggggacgacgacagtatcggcctcaggaagatcgcactccagccagctttccggcaccgcttctggtgccggaaaccaggcaaagcgccattcgccattcaggctgcgcaactgttgggaagggcgatcggtgcgggcctcttcgctattacgccagctggcgaaagggggatgtgctgcaaggcgattaagttgggtaacgccagggttttcccagtcacgacgttgtaaaacgacggccagtgaatccgtaatcatggtcatagctgtttcctgtgtgaaattgttatccgctcacaattccacacaacatacgagccggaagcataaagtgtaaagcctggggtgcctaatgagtgagctaacttacattaattgcgttgcgctcactgcccgctttccagtcgggaaacctgtcgtgccagctgcattaatgaatcggccaacgcgcggggagaggcggtttgcgtattgggcgccagggtggtttttcttttcaccagtgagacgggcaacagctgattgcccttcaccgcctggccctgagagagttgcagcaagcggtccacgctggtttgccccagcaggcgaaaatcctgtttgatggtggttaacggcgggatataacatgagctgtcttcggtatcgtcgtatcccactaccgagatatccgcaccaacgcgcagcccggactcggtaatggcgcgcattgcgcccagcgccatctgatcgttggcaaccagcatcgcagtgggaacgatgccctcattcagcatttgcatggtttgttgaaaaccggacatggcactccagtcgccttcccgttccgctatcggctgaatttgattgcgagtgagatatttatgccagccagccagacgcagacgcgccgagacagaacttaatgggcccgctaacagcgcgatttgctggtgacccaatgcgaccagatgctccacgcccagtcgcgtaccgtcttcatgggagaaaataatactgttgatgggtgtctggtcagagacatcaagaaataacgccggaacattagtgcaggcagcttccacagcaatggcatcctggtcatccagcggatagttaatgatcagcccactgacgcgttgcgcgagaagattgtgcaccgccgctttacaggcttcgacgccgcttcgttctaccatcgacaccaccacgctggcacccagttgatcggcgcgagatttaatcgccgcgacaatttgcgacggcgcgtgcagggccagactggaggtggcaacgccaatcagcaacgactgtttgcccgccagttgttgtgccacgcggttgggaatgtaattcagctccgccatcgccgcttccactttttcccgcgttttcgcagaaacgtggctggcctggttcaccacgcgggaaacggtctgataagagacaccggcatactctgcgacatcgtataacgttactggtttcacattcaccaccctgaattgactctcttccgggcgctatcatgccataccgcgaaaggttttgcaccattccatggtgtcggaattgctgcaggtcgagggggtcatggctgcgccccgacacccgccaacacccgctgacgcgccctgacgggcttgtctgctcccggcatccgcttacagacaagctgtgaccgtctccgggagctgcatgtgtcagaggttttcaccgtcatcaccgaaacgcgcgaggcaggatggcgcccaacagtcccccggccacggggcctgccaccatacccacgccgaaacaagcgctcatgagcccgaagtggcgagcccgatcttccccatcggtgatgtcggcgatataggcgccagcaaccgcacctgtggcgccggtgatgccggccacgatgcgtccggcgtagaggatccgtcgacctgcaggggggggggggcgctgaggtctgcctcgtgaagaaggtgttgctgactcataccaggcctgaatcgccccatcatccagccagaaagtgagggagccacggttgatgagagctttgttgtaggtggaccagttggtgattttgaacttttgctttgccacggaacggtctgcgttgtcgggaagatgcgtgatctgatccttcaactcagcaaaagttcgatttattcaacaaagccgccgtcccgtcaagtcagcgtaatgctctgccagtgttacaaccaattaaccaattctgattagaaaaactcatcgagcatcaaatgaaactgcaatttattcatatcaggattatcaataccatatttttgaaaaagccgtttctgtaatgaaggagaaaactcaccgaggcagttccataggatggcaagatcctggtatcggtctgcgattccgactcgtccaacatcaatacaacctattaatttcccctcgtcaaaaataaggttatcaagtgagaaatcaccatgagtgacgactgaatccggtgagaatggcaaaagcttatgcatttctttccagacttgttcaacaggccagccattacgctcgtcatcaaaatcactcgcatcaaccaaaccgttattcattcgtgattgcgcctgagcgagacgaaatacgcgatcgctgttaaaaggacaattacaaacaggaatcgaatgcaaccggcgcaggaacactgccagcgcatcaacaatattttcacctgaatcaggatattcttctaatacctggaatgctgttttcccggggatcgcagtggtgagtaaccatgcatcatcaggagtacggataaaatgcttgatggtcggaagaggcataaattccgtcagccagtttagtctgaccatctcatctgtaacatcattggcaacgctacctttgccatgtttcagaaacaactctggcgcatcgggcttcccatacaatcgatagattgtcgcacctgattgcccgacattatcgcgagcccatttatacccatataaatcagcatccatgttggaatttaatcgcggcctcgagcaagacgtttcccgttgaatatggctcat

SEQ ID NO: 141 - DNA, 5297 bp, Artificial
  Synthetic
aacaccccttgtattactgtttatgtaagcagacagttttattgttcatgatgatatatttttatcttgtgcaatgtaacatcagagattttgagacacaacgtggctttccatcaaaaaaatattgacaacataaaaaactttgtgttatacttgtggaattgtgagcggataacaattctatatctgttattttttccaaccacagatctatgagtaaaggagaagaacttttcactggagttgtcccaattcttgttgaattagatggtgatgttaatgggcacaaattttctgtcagtggagagggtgaaggtgatgcaacatacggaaaacttacccttaaatttatttgcactactggaaaactacctgttccatggccaacacttgtcactactctgacttatggtgttcaatgctttgcaagatacccagatcatatgaaacagcatgactttttcaagagtgccatgcccgaaggttatgtacaggaaagaactatatttttcaaagatgacgggaactacaagacacgtgctgaagtcaagtttgaaggtgatacccttgttaatagaatcgagttaaaaggtattgattttaaagaagatggaaacattcttggacacaaattggaatacaactataactcacacaaggtatacatcacggcagacaaacaaaagaatggaatcaaagttaacttcaaaactagacacaacattgaagatggaagcgttcaactagcagaccattatcaacaaaatactccaattggcgatggccctgtccttttaccagacaaccattacctgtccacacaatctaagctttcgaaagatcccaacgaaaagagagaccacatggtccttcttgagtttgtaacagctgctgggattacacatggcatggatgaactatacaaataagtcgaccggctgctaacaaagcccgcggccgctgaagatcgatctcgacgagtgagagaagattttcagcctgatacagattaaatcagaacgcagaagcggtctgataaaacagaatttgcctggcggcagtagcgcggtggtcccacctgaccccatgccgaactcagaagtgaaacgccgtagcgccgatggtagtgtggggtcaccccatgcgagagtagggaactgccaggcatcaaataaaacgaaaggctcagtcgaaagactgggcctttcgttttatctgttgtttgtcggtgaacgctctcctgagtaggacaaatccgccgggagcggatttgaacgttgcgaagcaacggcccggagggtggcgggcaggacgcccgccataaactgccaggcatcaaattaagcagaaggccatcctgacggatggcctttttgcgtttctacagagcgtcagaccccttaataagatgatcttcttgagatcgttttggtctgcgcgtaatctcttgctctgaaaacgaaaaaaccgccttgcagggcggtttttcgaaggttctctgagctaccaactctttgaaccgaggtaactggcttggaggagcgcagtcaccaaaacttgtcctttcagtttagccttaaccggcgcatgacttcaagactaactcctctaaatcaattaccagtggctgctgccagtggtgcttttgcatgtctttccgggttggactcaagacgatagttaccggataaggcgcagcggtcggactgaacggggggttcgtgcatacagtccagcttggagcgaactgcctacccggaactgagtgtcaggcgtggaatgagacaaacgcggccataacagcggaatgacaccggtaaaccgaaaggcaggaacaggagagcgcacgagggagccgccagggggaaacgcctggtatctttatagtcctgtcgggtttcgccaccactgatttgagcgtcagatttcgtgatgcttgtcaggggggcggagcctatggaaaaacggctttgccgcggccctctcggatctgtatggtgcactctcagtacaatctgctctgatgccgcatagttaagccagtatacactccgctatcgctacgtgactgcctcgacctgcagcaattccaacgccatcaaaaataattcgcgtctggccttcctgtagccagctttcatcaacattaaatgtgagcgagtaacaacccgtcggattctccgtgggaacaaacggcggattgaccgtaatgggataggtcacgttggtgtagatgggcgcatcgtaaccgtgcatctgccagtttgaggggacgacgacagtatcggcctcaggaagatcgcactccagccagctttccggcaccgcttctggtgccggaaaccaggcaaagcgccattcgccattcaggctgcgcaactgttgggaagggcgatcggtgcgggcctcttcgctattacgccagctggcgaaagggggatgtgctgcaaggcgattaagttgggtaacgccagggttttcccagtcacgacgttgtaaaacgacggccagtgaatccgtaatcatggtcatagctgtttcctgtgtgaaattgttatccgctcacaattccacacaacatacgagccggaagcataaagtgtaaagcctggggtgcctaatgagtgagctaacttacattaattgcgttgcgctcactgcccgctttccagtcgggaaacctgtcgtgccagctgcattaatgaatcggccaacgcgcggggagaggcggtttgcgtattgggcgccagggtggtttttcttttcaccagtgagacgggcaacagctgattgcccttcaccgcctggccctgagagagttgcagcaagcggtccacgctggtttgccccagcaggcgaaaatcctgtttgatggtggttaacggcgggatataacatgagctgtcttcggtatcgtcgtatcccactaccgagatatccgcaccaacgcgcagcccggactcggtaatggcgcgcattgcgcccagcgccatctgatcgttggcaaccagcatcgcagtgggaacgatgccctcattcagcatttgcatggtttgttgaaaaccggacatggcactccagtcgccttcccgttccgctatcggctgaatttgattgcgagtgagatatttatgccagccagccagacgcagacgcgccgagacagaacttaatgggcccgctaacagcgcgatttgctggtgacccaatgcgaccagatgctccacgcccagtcgcgtaccgtcttcatgggagaaaataatactgttgatgggtgtctggtcagagacatcaagaaataacgccggaacattagtgcaggcagcttccacagcaatggcatcctggtcatccagcggatagttaatgatcagcccactgacgcgttgcgcgagaagattgtgcaccgccgctttacaggcttcgacgccgcttcgttctaccatcgacaccaccacgctggcacccagttgatcggcgcgagatttaatcgccgcgacaatttgcgacggcgcgtgcagggccagactggaggtggcaacgccaatcagcaacgactgtttgcccgccagttgttgtgccacgcggttgggaatgtaattcagctccgccatcgccgcttccactttttcccgcgttttcgcagaaacgtggctggcctggttcaccacgcgggaaacggtctgataagagacaccggcatactctgcgacatcgtataacgttactggtttcacattcaccaccctgaattgactctcttccgggcgctatcatgccataccgcgaaaggttttgcaccattccatggtgtcggaattgctgcaggtcgagggggtcatggctgcgccccgacacccgccaacacccgctgacgcgccctgacgggcttgtctgctcccggcatccgcttacagacaagctgtgaccgtctccgggagctgcatgtgtcagaggttttcaccgtcatcaccgaaacgcgcgaggcaggatggcgcccaacagtcccccggccacggggcctgccaccatacccacgccgaaacaagcgctcatgagcccgaagtggcgagcccgatcttccccatcggtgatgtcggcgatataggcgccagcaaccgcacctgtggcgccggtgatgccggccacgatgcgtccggcgtagaggatccgtcgacctgcaggggggggggggcgctgaggtctgcctcgtgaagaaggtgttgctgactcataccaggcctgaatcgccccatcatccagccagaaagtgagggagccacggttgatgagagctttgttgtaggtggaccagttggtgattttgaacttttgctttgccacggaacggtctgcgttgtcgggaagatgcgtgatctgatccttcaactcagcaaaagttcgatttattcaacaaagccgccgtcccgtcaagtcagcgtaatgctctgccagtgttacaaccaattaaccaattctgattagaaaaactcatcgagcatcaaatgaaactgcaatttattcatatcaggattatcaataccatatttttgaaaaagccgtttctgtaatgaaggagaaaactcaccgaggcagttccataggatggcaagatcctggtatcggtctgcgattccgactcgtccaacatcaatacaacctattaatttcccctcgtcaaaaataaggttatcaagtgagaaatcaccatgagtgacgactgaatccggtgagaatggcaaaagcttatgcatttctttccagacttgttcaacaggccagccattacgctcgtcatcaaaatcactcgcatcaaccaaaccgttattcattcgtgattgcgcctgagcgagacgaaatacgcgatcgctgttaaaaggacaattacaaacaggaatcgaatgcaaccggcgcaggaacactgccagcgcatcaacaatattttcacctgaatcaggatattcttctaatacctggaatgctgttttcccggggatcgcagtggtgagtaaccatgcatcatcaggagtacggataaaatgcttgatggtcggaagaggcataaattccgtcagccagtttagtctgaccatctcatctgtaacatcattggcaacgctacctttgccatgtttcagaaacaactctggcgcatcgggcttcccatacaatcgatagattgtcgcacctgattgcccgacattatcgcgagcccatttatacccatataaatcagcatccatgttggaatttaatcgcggcctcgagcaagacgtttcccgttgaatatggctcat

SEQ ID NO: 142 - DNA, 5324 bp, Artificial
  Synthetic
aacaccccttgtattactgtttatgtaagcagacagttttattgttcatgatgatatatttttatcttgtgcaatgtaacatcagagattttgagacacaacgtggctttccatcaaaaaaatattgacaacataaaaaactttgtgttatacttgtggaattgtgagcggataacaattctatatctgttattttttccaaccacagatctatgagcaaaggtgaagaactgtttaccggcagtaaaggagaagaacttttcactggagttgtcccaattcttgttgaattagatggtgatgttaatgggcacaaattttctgtcagtggagagggtgaaggtgatgcaacatacggaaaacttacccttaaatttatttgcactactggaaaactacctgttccatggccaacacttgtcactactctgacttatggtgttcaatgctttgcaagatacccagatcatatgaaacagcatgactttttcaagagtgccatgcccgaaggttatgtacaggaaagaactatatttttcaaagatgacgggaactacaagacacgtgctgaagtcaagtttgaaggtgatacccttgttaatagaatcgagttaaaaggtattgattttaaagaagatggaaacattcttggacacaaattggaatacaactataactcacacaaggtatacatcacggcagacaaacaaaagaatggaatcaaagttaacttcaaaactagacacaacattgaagatggaagcgttcaactagcagaccattatcaacaaaatactccaattggcgatggccctgtccttttaccagacaaccattacctgtccacacaatctaagctttcgaaagatcccaacgaaaagagagaccacatggtccttcttgagtttgtaacagctgctgggattacacatggcatggatgaactatacaaataagtcgaccggctgctaacaaagcccgcggccgctgaagatcgatctcgacgagtgagagaagattttcagcctgatacagattaaatcagaacgcagaagcggtctgataaaacagaatttgcctggcggcagtagcgcggtggtcccacctgaccccatgccgaactcagaagtgaaacgccgtagcgccgatggtagtgtggggtcaccccatgcgagagtagggaactgccaggcatcaaataaaacgaaaggctcagtcgaaagactgggcctttcgttttatctgttgtttgtcggtgaacgctctcctgagtaggacaaatccgccgggagcggatttgaacgttgcgaagcaacggcccggagggtggcgggcaggacgcccgccataaactgccaggcatcaaattaagcagaaggccatcctgacggatggcctttttgcgtttctacagagcgtcagaccccttaataagatgatcttcttgagatcgttttggtctgcgcgtaatctcttgctctgaaaacgaaaaaaccgccttgcagggcggtttttcgaaggttctctgagctaccaactctttgaaccgaggtaactggcttggaggagcgcagtcaccaaaacttgtcctttcagtttagccttaaccggcgcatgacttcaagactaactcctctaaatcaattaccagtggctgctgccagtggtgcttttgcatgtctttccgggttggactcaagacgatagttaccggataaggcgcagcggtcggactgaacggggggttcgtgcatacagtccagcttggagcgaactgcctacccggaactgagtgtcaggcgtggaatgagacaaacgcggccataacagcggaatgacaccggtaaaccgaaaggcaggaacaggagagcgcacgagggagccgccagggggaaacgcctggtatctttatagtcctgtcgggtttcgccaccactgatttgagcgtcagatttcgtgatgcttgtcaggggggcggagcctatggaaaaacggctttgccgcggccctctcggatctgtatggtgcactctcagtacaatctgctctgatgccgcatagttaagccagtatacactccgctatcgctacgtgactgcctcgacctgcagcaattccaacgccatcaaaaataattcgcgtctggccttcctgtagccagctttcatcaacattaaatgtgagcgagtaacaacccgtcggattctccgtgggaacaaacggcggattgaccgtaatgggataggtcacgttggtgtagatgggcgcatcgtaaccgtgcatctgccagtttgaggggacgacgacagtatcggcctcaggaagatcgcactccagccagctttccggcaccgcttctggtgccggaaaccaggcaaagcgccattcgccattcaggctgcgcaactgttgggaagggcgatcggtgcgggcctcttcgctattacgccagctggcgaaagggggatgtgctgcaaggcgattaagttgggtaacgccagggttttcccagtcacgacgttgtaaaacgacggccagtgaatccgtaatcatggtcatagctgtttcctgtgtgaaattgttatccgctcacaattccacacaacatacgagccggaagcataaagtgtaaagcctggggtgcctaatgagtgagctaacttacattaattgcgttgcgctcactgcccgctttccagtcgggaaacctgtcgtgccagctgcattaatgaatcggccaacgcgcggggagaggcggtttgcgtattgggcgccagggtggtttttcttttcaccagtgagacgggcaacagctgattgcccttcaccgcctggccctgagagagttgcagcaagcggtccacgctggtttgccccagcaggcgaaaatcctgtttgatggtggttaacggcgggatataacatgagctgtcttcggtatcgtcgtatcccactaccgagatatccgcaccaacgcgcagcccggactcggtaatggcgcgcattgcgcccagcgccatctgatcgttggcaaccagcatcgcagtgggaacgatgccctcattcagcatttgcatggtttgttgaaaaccggacatggcactccagtcgccttcccgttccgctatcggctgaatttgattgcgagtgagatatttatgccagccagccagacgcagacgcgccgagacagaacttaatgggcccgctaacagcgcgatttgctggtgacccaatgcgaccagatgctccacgcccagtcgcgtaccgtcttcatgggagaaaataatactgttgatgggtgtctggtcagagacatcaagaaataacgccggaacattagtgcaggcagcttccacagcaatggcatcctggtcatccagcggatagttaatgatcagcccactgacgcgttgcgcgagaagattgtgcaccgccgctttacaggcttcgacgccgcttcgttctaccatcgacaccaccacgctggcacccagttgatcggcgcgagatttaatcgccgcgacaatttgcgacggcgcgtgcagggccagactggaggtggcaacgccaatcagcaacgactgtttgcccgccagttgttgtgccacgcggttgggaatgtaattcagctccgccatcgccgcttccactttttcccgcgttttcgcagaaacgtggctggcctggttcaccacgcgggaaacggtctgataagagacaccggcatactctgcgacatcgtataacgttactggtttcacattcaccaccctgaattgactctcttccgggcgctatcatgccataccgcgaaaggttttgcaccattccatggtgtcggaattgctgcaggtcgagggggtcatggctgcgccccgacacccgccaacacccgctgacgcgccctgacgggcttgtctgctcccggcatccgcttacagacaagctgtgaccgtctccgggagctgcatgtgtcagaggttttcaccgtcatcaccgaaacgcgcgaggcaggatggcgcccaacagtcccccggccacggggcctgccaccatacccacgccgaaacaagcgctcatgagcccgaagtggcgagcccgatcttccccatcggtgatgtcggcgatataggcgccagcaaccgcacctgtggcgccggtgatgccggccacgatgcgtccggcgtagaggatccgtcgacctgcaggggggggggggcgctgaggtctgcctcgtgaagaaggtgttgctgactcataccaggcctgaatcgccccatcatccagccagaaagtgagggagccacggttgatgagagctttgttgtaggtggaccagttggtgattttgaacttttgctttgccacggaacggtctgcgttgtcgggaagatgcgtgatctgatccttcaactcagcaaaagttcgatttattcaacaaagccgccgtcccgtcaagtcagcgtaatgctctgccagtgttacaaccaattaaccaattctgattagaaaaactcatcgagcatcaaatgaaactgcaatttattcatatcaggattatcaataccatatttttgaaaaagccgtttctgtaatgaaggagaaaactcaccgaggcagttccataggatggcaagatcctggtatcggtctgcgattccgactcgtccaacatcaatacaacctattaatttcccctcgtcaaaaataaggttatcaagtgagaaatcaccatgagtgacgactgaatccggtgagaatggcaaaagcttatgcatttctttccagacttgttcaacaggccagccattacgctcgtcatcaaaatcactcgcatcaaccaaaccgttattcattcgtgattgcgcctgagcgagacgaaatacgcgatcgctgttaaaaggacaattacaaacaggaatcgaatgcaaccggcgcaggaacactgccagcgcatcaacaatattttcacctgaatcaggatattcttctaatacctggaatgctgttttcccggggatcgcagtggtgagtaaccatgcatcatcaggagtacggataaaatgcttgatggtcggaagaggcataaattccgtcagccagtttagtctgaccatctcatctgtaacatcattggcaacgctacctttgccatgtttcagaaacaactctggcgcatcgggcttcccatacaatcgatagattgtcgcacctgattgcccgacattatcgcgagcccatttatacccatataaatcagcatccatgttggaatttaatcgcggcctcgagcaagacgtttcccgttgaatatggctcat

SEQ ID NO: 143 - DNA, 5327 bp, Artificial
  Synthetic
aacaccccttgtattactgtttatgtaagcagacagttttattgttcatgatgatatatttttatcttgtgcaatgtaacatcagagattttgagacacaacgtggctttccatcaaaaaaatattgacaacataaaaaactttgtgttatacttgtggaattgtgagcggataacaattctatatctgttattttttccaaccacagatctatgagcaaaggtgaagaactgtttaccggcgtcagtaaaggagaagaacttttcactggagttgtcccaattcttgttgaattagatggtgatgttaatgggcacaaattttctgtcagtggagagggtgaaggtgatgcaacatacggaaaacttacccttaaactgatttgcactactggaaaactacctgttccatggccaacacttgtcactactctgggctatggtctgcaatgctttgccagatacccagatcatatgaaacagcatgactttttcaagagtgccatgcccgaaggttatgtacaggaaagaactatatttttcaaagatgacgggaactacaagacacgtgctgaagtcaagtttgaaggtgatacccttgttaatagaatcgagttaaaaggtattgattttaaagaagatggaaacattcttggacacaaattggaatacaactataactcacacaatgtatacatcaccgcagacaaacaaaagaatggaatcaaagccaacttcaaaattagacacaacattgaagatggaggcgttcaactagcagaccattatcaacaaaatactccaattggcgatggccctgtccttttaccagacaaccattacctgtcctaccaatctgccctttcgaaagatcccaacgaaaagagagaccacatggtccttcttgagtttgtaacagctgctgggattacacatggcatggatgaactatacaaataagtcgaccggctgctaacaaagcccgcggccgctgaagatcgatctcgacgagtgagagaagattttcagcctgatacagattaaatcagaacgcagaagcggtctgataaaacagaatttgcctggcggcagtagcgcggtggtcccacctgaccccatgccgaactcagaagtgaaacgccgtagcgccgatggtagtgtggggtcaccccatgcgagagtagggaactgccaggcatcaaataaaacgaaaggctcagtcgaaagactgggcctttcgttttatctgttgtttgtcggtgaacgctctcctgagtaggacaaatccgccgggagcggatttgaacgttgcgaagcaacggcccggagggtggcgggcaggacgcccgccataaactgccaggcatcaaattaagcagaaggccatcctgacggatggcctttttgcgtttctacagagcgtcagaccccttaataagatgatcttcttgagatcgttttggtctgcgcgtaatctcttgctctgaaaacgaaaaaaccgccttgcagggcggtttttcgaaggttctctgagctaccaactctttgaaccgaggtaactggcttggaggagcgcagtcaccaaaacttgtcctttcagtttagccttaaccggcgcatgacttcaagactaactcctctaaatcaattaccagtggctgctgccagtggtgcttttgcatgtctttccgggttggactcaagacgatagttaccggataaggcgcagcggtcggactgaacggggggttcgtgcatacagtccagcttggagcgaactgcctacccggaactgagtgtcaggcgtggaatgagacaaacgcggccataacagcggaatgacaccggtaaaccgaaaggcaggaacaggagagcgcacgagggagccgccagggggaaacgcctggtatctttatagtcctgtcgggtttcgccaccactgatttgagcgtcagatttcgtgatgcttgtcaggggggcggagcctatggaaaaacggctttgccgcggccctctcggatctgtatggtgcactctcagtacaatctgctctgatgccgcatagttaagccagtatacactccgctatcgctacgtgactgcctcgacctgcagcaattccaacgccatcaaaaataattcgcgtctggccttcctgtagccagctttcatcaacattaaatgtgagcgagtaacaacccgtcggattctccgtgggaacaaacggcggattgaccgtaatgggataggtcacgttggtgtagatgggcgcatcgtaaccgtgcatctgccagtttgaggggacgacgacagtatcggcctcaggaagatcgcactccagccagctttccggcaccgcttctggtgccggaaaccaggcaaagcgccattcgccattcaggctgcgcaactgttgggaagggcgatcggtgcgggcctcttcgctattacgccagctggcgaaagggggatgtgctgcaaggcgattaagttgggtaacgccagggttttcccagtcacgacgttgtaaaacgacggccagtgaatccgtaatcatggtcatagctgtttcctgtgtgaaattgttatccgctcacaattccacacaacatacgagccggaagcataaagtgtaaagcctggggtgcctaatgagtgagctaacttacattaattgcgttgcgctcactgcccgctttccagtcgggaaacctgtcgtgccagctgcattaatgaatcggccaacgcgcggggagaggcggtttgcgtattgggcgccagggtggtttttcttttcaccagtgagacgggcaacagctgattgcccttcaccgcctggccctgagagagttgcagcaagcggtccacgctggtttgccccagcaggcgaaaatcctgtttgatggtggttaacggcgggatataacatgagctgtcttcggtatcgtcgtatcccactaccgagatatccgcaccaacgcgcagcccggactcggtaatggcgcgcattgcgcccagcgccatctgatcgttggcaaccagcatcgcagtgggaacgatgccctcattcagcatttgcatggtttgttgaaaaccggacatggcactccagtcgccttcccgttccgctatcggctgaatttgattgcgagtgagatatttatgccagccagccagacgcagacgcgccgagacagaacttaatgggcccgctaacagcgcgatttgctggtgacccaatgcgaccagatgctccacgcccagtcgcgtaccgtcttcatgggagaaaataatactgttgatgggtgtctggtcagagacatcaagaaataacgccggaacattagtgcaggcagcttccacagcaatggcatcctggtcatccagcggatagttaatgatcagcccactgacgcgttgcgcgagaagattgtgcaccgccgctttacaggcttcgacgccgcttcgttctaccatcgacaccaccacgctggcacccagttgatcggcgcgagatttaatcgccgcgacaatttgcgacggcgcgtgcagggccagactggaggtggcaacgccaatcagcaacgactgtttgcccgccagttgttgtgccacgcggttgggaatgtaattcagctccgccatcgccgcttccactttttcccgcgttttcgcagaaacgtggctggcctggttcaccacgcgggaaacggtctgataagagacaccggcatactctgcgacatcgtataacgttactggtttcacattcaccaccctgaattgactctcttccgggcgctatcatgccataccgcgaaaggttttgcaccattccatggtgtcggaattgctgcaggtcgagggggtcatggctgcgccccgacacccgccaacacccgctgacgcgccctgacgggcttgtctgctcccggcatccgcttacagacaagctgtgaccgtctccgggagctgcatgtgtcagaggttttcaccgtcatcaccgaaacgcgcgaggcaggatggcgcccaacagtcccccggccacggggcctgccaccatacccacgccgaaacaagcgctcatgagcccgaagtggcgagcccgatcttccccatcggtgatgtcggcgatataggcgccagcaaccgcacctgtggcgccggtgatgccggccacgatgcgtccggcgtagaggatccgtcgacctgcaggggggggggggcgctgaggtctgcctcgtgaagaaggtgttgctgactcataccaggcctgaatcgccccatcatccagccagaaagtgagggagccacggttgatgagagctttgttgtaggtggaccagttggtgattttgaacttttgctttgccacggaacggtctgcgttgtcgggaagatgcgtgatctgatccttcaactcagcaaaagttcgatttattcaacaaagccgccgtcccgtcaagtcagcgtaatgctctgccagtgttacaaccaattaaccaattctgattagaaaaactcatcgagcatcaaatgaaactgcaatttattcatatcaggattatcaataccatatttttgaaaaagccgtttctgtaatgaaggagaaaactcaccgaggcagttccataggatggcaagatcctggtatcggtctgcgattccgactcgtccaacatcaatacaacctattaatttcccctcgtcaaaaataaggttatcaagtgagaaatcaccatgagtgacgactgaatccggtgagaatggcaaaagcttatgcatttctttccagacttgttcaacaggccagccattacgctcgtcatcaaaatcactcgcatcaaccaaaccgttattcattcgtgattgcgcctgagcgagacgaaatacgcgatcgctgttaaaaggacaattacaaacaggaatcgaatgcaaccggcgcaggaacactgccagcgcatcaacaatattttcacctgaatcaggatattcttctaatacctggaatgctgttttcccggggatcgcagtggtgagtaaccatgcatcatcaggagtacggataaaatgcttgatggtcggaagaggcataaattccgtcagccagtttagtctgaccatctcatctgtaacatcattggcaacgctacctttgccatgtttcagaaacaactctggcgcatcgggcttcccatacaatcgatagattgtcgcacctgattgcccgacattatcgcgagcccatttatacccatataaatcagcatccatgttggaatttaatcgcggcctcgagcaagacgtttcccgttgaatatggctcat

SEQ ID NO: 144 - DNA, 5294 bp, Artificial
  Synthetic
aacaccccttgtattactgtttatgtaagcagacagttttattgttcatgatgatatatttttatcttgtgcaatgtaacatcagagattttgagacacaacgtggctttccatcaaaaaaatattgacaacataaaaaactttgtgttatacttgtggaattgtgagcggataacaattctatatctgttattttttccaaccacagatctatggtgagcaagggcgaggggcaatcgaagcatgggctaaaggaggagatgacggtgaagtaccacatggaaggttgcgttaatggtcacaaatttgtcattactggagagggcattggaaacccttttaagggtaagcaaactgcaaatttgtgtgtgatagaaggaggcccgctgccgttctcggaggacattttaagtccgggttttaaatatggtgaccggattttcacagagtacccacaggatattgtagattacttcaagaactcatgtccagcgggctatacgtgggaaaggagcttcctctttgaggacggagcggtctgtcgatgcaacgtggacataacagtctctgaaaaggagaactgcatctatcacaaaagtatcttcagaggggtgaattttcccgccgacggccccgtaatgaagaaaatgaccactaattgggaagctagtaccgagaaaattgtgcctgttccaaagcaagggatattaaaaggaaaggtcaaaatgtacctattgctgaaggatggcggtcgttatcattgccagtttgatacggtatataaagctaaatcagtgccctccaagatgccagaatggcattttatacagcataagctccttagggaggaccgctctgatgctaaaaaccagaaatggcaattaacagaacatgcaatcgcaggcatggacgagctgtacaagtaagtcgaccggctgctaacaaagcccgcggccgctgaagatcgatctcgacgagtgagagaagattttcagcctgatacagattaaatcagaacgcagaagcggtctgataaaacagaatttgcctggcggcagtagcgcggtggtcccacctgaccccatgccgaactcagaagtgaaacgccgtagcgccgatggtagtgtggggtcaccccatgcgagagtagggaactgccaggcatcaaataaaacgaaaggctcagtcgaaagactgggcctttcgttttatctgttgtttgtcggtgaacgctctcctgagtaggacaaatccgccgggagcggatttgaacgttgcgaagcaacggcccggagggtggcgggcaggacgcccgccataaactgccaggcatcaaattaagcagaaggccatcctgacggatggcctttttgcgtttctacagagcgtcagaccccttaataagatgatcttcttgagatcgttttggtctgcgcgtaatctcttgctctgaaaacgaaaaaaccgccttgcagggcggtttttcgaaggttctctgagctaccaactctttgaaccgaggtaactggcttggaggagcgcagtcaccaaaacttgtcctttcagtttagccttaaccggcgcatgacttcaagactaactcctctaaatcaattaccagtggctgctgccagtggtgcttttgcatgtctttccgggttggactcaagacgatagttaccggataaggcgcagcggtcggactgaacggggggttcgtgcatacagtccagcttggagcgaactgcctacccggaactgagtgtcaggcgtggaatgagacaaacgcggccataacagcggaatgacaccggtaaaccgaaaggcaggaacaggagagcgcacgagggagccgccagggggaaacgcctggtatctttatagtcctgtcgggtttcgccaccactgatttgagcgtcagatttcgtgatgcttgtcaggggggcggagcctatggaaaaacggctttgccgcggccctctcggatctgtatggtgcactctcagtacaatctgctctgatgccgcatagttaagccagtatacactccgctatcgctacgtgactgcctcgacctgcagcaattccaacgccatcaaaaataattcgcgtctggccttcctgtagccagctttcatcaacattaaatgtgagcgagtaacaacccgtcggattctccgtgggaacaaacggcggattgaccgtaatgggataggtcacgttggtgtagatgggcgcatcgtaaccgtgcatctgccagtttgaggggacgacgacagtatcggcctcaggaagatcgcactccagccagctttccggcaccgcttctggtgccggaaaccaggcaaagcgccattcgccattcaggctgcgcaactgttgggaagggcgatcggtgcgggcctcttcgctattacgccagctggcgaaagggggatgtgctgcaaggcgattaagttgggtaacgccagggttttcccagtcacgacgttgtaaaacgacggccagtgaatccgtaatcatggtcatagctgtttcctgtgtgaaattgttatccgctcacaattccacacaacatacgagccggaagcataaagtgtaaagcctggggtgcctaatgagtgagctaacttacattaattgcgttgcgctcactgcccgctttccagtcgggaaacctgtcgtgccagctgcattaatgaatcggccaacgcgcggggagaggcggtttgcgtattgggcgccagggtggtttttcttttcaccagtgagacgggcaacagctgattgcccttcaccgcctggccctgagagagttgcagcaagcggtccacgctggtttgccccagcaggcgaaaatcctgtttgatggtggttaacggcgggatataacatgagctgtcttcggtatcgtcgtatcccactaccgagatatccgcaccaacgcgcagcccggactcggtaatggcgcgcattgcgcccagcgccatctgatcgttggcaaccagcatcgcagtgggaacgatgccctcattcagcatttgcatggtttgttgaaaaccggacatggcactccagtcgccttcccgttccgctatcggctgaatttgattgcgagtgagatatttatgccagccagccagacgcagacgcgccgagacagaacttaatgggcccgctaacagcgcgatttgctggtgacccaatgcgaccagatgctccacgcccagtcgcgtaccgtcttcatgggagaaaataatactgttgatgggtgtctggtcagagacatcaagaaataacgccggaacattagtgcaggcagcttccacagcaatggcatcctggtcatccagcggatagttaatgatcagcccactgacgcgttgcgcgagaagattgtgcaccgccgctttacaggcttcgacgccgcttcgttctaccatcgacaccaccacgctggcacccagttgatcggcgcgagatttaatcgccgcgacaatttgcgacggcgcgtgcagggccagactggaggtggcaacgccaatcagcaacgactgtttgcccgccagttgttgtgccacgcggttgggaatgtaattcagctccgccatcgccgcttccactttttcccgcgttttcgcagaaacgtggctggcctggttcaccacgcgggaaacggtctgataagagacaccggcatactctgcgacatcgtataacgttactggtttcacattcaccaccctgaattgactctcttccgggcgctatcatgccataccgcgaaaggttttgcaccattccatggtgtcggaattgctgcaggtcgagggggtcatggctgcgccccgacacccgccaacacccgctgacgcgccctgacgggcttgtctgctcccggcatccgcttacagacaagctgtgaccgtctccgggagctgcatgtgtcagaggttttcaccgtcatcaccgaaacgcgcgaggcaggatggcgcccaacagtcccccggccacggggcctgccaccatacccacgccgaaacaagcgctcatgagcccgaagtggcgagcccgatcttccccatcggtgatgtcggcgatataggcgccagcaaccgcacctgtggcgccggtgatgccggccacgatgcgtccggcgtagaggatccgtcgacctgcaggggggggggggcgctgaggtctgcctcgtgaagaaggtgttgctgactcataccaggcctgaatcgccccatcatccagccagaaagtgagggagccacggttgatgagagctttgttgtaggtggaccagttggtgattttgaacttttgctttgccacggaacggtctgcgttgtcgggaagatgcgtgatctgatccttcaactcagcaaaagttcgatttattcaacaaagccgccgtcccgtcaagtcagcgtaatgctctgccagtgttacaaccaattaaccaattctgattagaaaaactcatcgagcatcaaatgaaactgcaatttattcatatcaggattatcaataccatatttttgaaaaagccgtttctgtaatgaaggagaaaactcaccgaggcagttccataggatggcaagatcctggtatcggtctgcgattccgactcgtccaacatcaatacaacctattaatttcccctcgtcaaaaataaggttatcaagtgagaaatcaccatgagtgacgactgaatccggtgagaatggcaaaagcttatgcatttctttccagacttgttcaacaggccagccattacgctcgtcatcaaaatcactcgcatcaaccaaaccgttattcattcgtgattgcgcctgagcgagacgaaatacgcgatcgctgttaaaaggacaattacaaacaggaatcgaatgcaaccggcgcaggaacactgccagcgcatcaacaatattttcacctgaatcaggatattcttctaatacctggaatgctgttttcccggggatcgcagtggtgagtaaccatgcatcatcaggagtacggataaaatgcttgatggtcggaagaggcataaattccgtcagccagtttagtctgaccatctcatctgtaacatcattggcaacgctacctttgccatgtttcagaaacaactctggcgcatcgggcttcccatacaatcgatagattgtcgcacctgattgcccgacattatcgcgagcccatttatacccatataaatcagcatccatgttggaatttaatcgcggcctcgagcaagacgtttcccgttgaatatggctcat

SEQ ID NO: 145 - DNA, 5321 bp, Artificial
  Synthetic
aacaccccttgtattactgtttatgtaagcagacagttttattgttcatgatgatatatttttatcttgtgcaatgtaacatcagagattttgagacacaacgtggctttccatcaaaaaaatattgacaacataaaaaactttgtgttatacttgtggaattgtgagcggataacaattctatatctgttattttttccaaccacagatctatgagcaaaggtgaagaactgtttaccggcgtgagcaagggcgaggggcaatcgaagcatgggctaaaggaggagatgacggtgaagtaccacatggaaggttgcgttaatggtcacaaatttgtcattactggagagggcattggaaacccttttaagggtaagcaaactgcaaatttgtgtgtgatagaaggaggcccgctgccgttctcggaggacattttaagtccgggttttaaatatggtgaccggattttcacagagtacccacaggatattgtagattacttcaagaactcatgtccagcgggctatacgtgggaaaggagcttcctctttgaggacggagcggtctgtcgatgcaacgtggacataacagtctctgaaaaggagaactgcatctatcacaaaagtatcttcagaggggtgaattttcccgccgacggccccgtaatgaagaaaatgaccactaattgggaagctagtaccgagaaaattgtgcctgttccaaagcaagggatattaaaaggaaaggtcaaaatgtacctattgctgaaggatggcggtcgttatcattgccagtttgatacggtatataaagctaaatcagtgccctccaagatgccagaatggcattttatacagcataagctccttagggaggaccgctctgatgctaaaaaccagaaatggcaattaacagaacatgcaatcgcaggcatggacgagctgtacaagtaagtcgaccggctgctaacaaagcccgcggccgctgaagatcgatctcgacgagtgagagaagattttcagcctgatacagattaaatcagaacgcagaagcggtctgataaaacagaatttgcctggcggcagtagcgcggtggtcccacctgaccccatgccgaactcagaagtgaaacgccgtagcgccgatggtagtgtggggtcaccccatgcgagagtagggaactgccaggcatcaaataaaacgaaaggctcagtcgaaagactgggcctttcgttttatctgttgtttgtcggtgaacgctctcctgagtaggacaaatccgccgggagcggatttgaacgttgcgaagcaacggcccggagggtggcgggcaggacgcccgccataaactgccaggcatcaaattaagcagaaggccatcctgacggatggcctttttgcgtttctacagagcgtcagaccccttaataagatgatcttcttgagatcgttttggtctgcgcgtaatctcttgctctgaaaacgaaaaaaccgccttgcagggcggtttttcgaaggttctctgagctaccaactctttgaaccgaggtaactggcttggaggagcgcagtcaccaaaacttgtcctttcagtttagccttaaccggcgcatgacttcaagactaactcctctaaatcaattaccagtggctgctgccagtggtgcttttgcatgtctttccgggttggactcaagacgatagttaccggataaggcgcagcggtcggactgaacggggggttcgtgcatacagtccagcttggagcgaactgcctacccggaactgagtgtcaggcgtggaatgagacaaacgcggccataacagcggaatgacaccggtaaaccgaaaggcaggaacaggagagcgcacgagggagccgccagggggaaacgcctggtatctttatagtcctgtcgggtttcgccaccactgatttgagcgtcagatttcgtgatgcttgtcaggggggcggagcctatggaaaaacggctttgccgcggccctctcggatctgtatggtgcactctcagtacaatctgctctgatgccgcatagttaagccagtatacactccgctatcgctacgtgactgcctcgacctgcagcaattccaacgccatcaaaaataattcgcgtctggccttcctgtagccagctttcatcaacattaaatgtgagcgagtaacaacccgtcggattctccgtgggaacaaacggcggattgaccgtaatgggataggtcacgttggtgtagatgggcgcatcgtaaccgtgcatctgccagtttgaggggacgacgacagtatcggcctcaggaagatcgcactccagccagctttccggcaccgcttctggtgccggaaaccaggcaaagcgccattcgccattcaggctgcgcaactgttgggaagggcgatcggtgcgggcctcttcgctattacgccagctggcgaaagggggatgtgctgcaaggcgattaagttgggtaacgccagggttttcccagtcacgacgttgtaaaacgacggccagtgaatccgtaatcatggtcatagctgtttcctgtgtgaaattgttatccgctcacaattccacacaacatacgagccggaagcataaagtgtaaagcctggggtgcctaatgagtgagctaacttacattaattgcgttgcgctcactgcccgctttccagtcgggaaacctgtcgtgccagctgcattaatgaatcggccaacgcgcggggagaggcggtttgcgtattgggcgccagggtggtttttcttttcaccagtgagacgggcaacagctgattgcccttcaccgcctggccctgagagagttgcagcaagcggtccacgctggtttgccccagcaggcgaaaatcctgtttgatggtggttaacggcgggatataacatgagctgtcttcggtatcgtcgtatcccactaccgagatatccgcaccaacgcgcagcccggactcggtaatggcgcgcattgcgcccagcgccatctgatcgttggcaaccagcatcgcagtgggaacgatgccctcattcagcatttgcatggtttgttgaaaaccggacatggcactccagtcgccttcccgttccgctatcggctgaatttgattgcgagtgagatatttatgccagccagccagacgcagacgcgccgagacagaacttaatgggcccgctaacagcgcgatttgctggtgacccaatgcgaccagatgctccacgcccagtcgcgtaccgtcttcatgggagaaaataatactgttgatgggtgtctggtcagagacatcaagaaataacgccggaacattagtgcaggcagcttccacagcaatggcatcctggtcatccagcggatagttaatgatcagcccactgacgcgttgcgcgagaagattgtgcaccgccgctttacaggcttcgacgccgcttcgttctaccatcgacaccaccacgctggcacccagttgatcggcgcgagatttaatcgccgcgacaatttgcgacggcgcgtgcagggccagactggaggtggcaacgccaatcagcaacgactgtttgcccgccagttgttgtgccacgcggttgggaatgtaattcagctccgccatcgccgcttccactttttcccgcgttttcgcagaaacgtggctggcctggttcaccacgcgggaaacggtctgataagagacaccggcatactctgcgacatcgtataacgttactggtttcacattcaccaccctgaattgactctcttccgggcgctatcatgccataccgcgaaaggttttgcaccattccatggtgtcggaattgctgcaggtcgagggggtcatggctgcgccccgacacccgccaacacccgctgacgcgccctgacgggcttgtctgctcccggcatccgcttacagacaagctgtgaccgtctccgggagctgcatgtgtcagaggttttcaccgtcatcaccgaaacgcgcgaggcaggatggcgcccaacagtcccccggccacggggcctgccaccatacccacgccgaaacaagcgctcatgagcccgaagtggcgagcccgatcttccccatcggtgatgtcggcgatataggcgccagcaaccgcacctgtggcgccggtgatgccggccacgatgcgtccggcgtagaggatccgtcgacctgcaggggggggggggcgctgaggtctgcctcgtgaagaaggtgttgctgactcataccaggcctgaatcgccccatcatccagccagaaagtgagggagccacggttgatgagagctttgttgtaggtggaccagttggtgattttgaacttttgctttgccacggaacggtctgcgttgtcgggaagatgcgtgatctgatccttcaactcagcaaaagttcgatttattcaacaaagccgccgtcccgtcaagtcagcgtaatgctctgccagtgttacaaccaattaaccaattctgattagaaaaactcatcgagcatcaaatgaaactgcaatttattcatatcaggattatcaataccatatttttgaaaaagccgtttctgtaatgaaggagaaaactcaccgaggcagttccataggatggcaagatcctggtatcggtctgcgattccgactcgtccaacatcaatacaacctattaatttcccctcgtcaaaaataaggttatcaagtgagaaatcaccatgagtgacgactgaatccggtgagaatggcaaaagcttatgcatttctttccagacttgttcaacaggccagccattacgctcgtcatcaaaatcactcgcatcaaccaaaccgttattcattcgtgattgcgcctgagcgagacgaaatacgcgatcgctgttaaaaggacaattacaaacaggaatcgaatgcaaccggcgcaggaacactgccagcgcatcaacaatattttcacctgaatcaggatattcttctaatacctggaatgctgttttcccggggatcgcagtggtgagtaaccatgcatcatcaggagtacggataaaatgcttgatggtcggaagaggcataaattccgtcagccagtttagtctgaccatctcatctgtaacatcattggcaacgctacctttgccatgtttcagaaacaactctggcgcatcgggcttcccatacaatcgatagattgtcgcacctgattgcccgacattatcgcgagcccatttatacccatataaatcagcatccatgttggaatttaatcgcggcctcgagcaagacgtttcccgttgaatatggctcat

SEQ ID NO: 146 - DNA, 5276 bp, Artificial
  Synthetic
aacaccccttgtattactgtttatgtaagcagacagttttattgttcatgatgatatatttttatcttgtgcaatgtaacatcagagattttgagacacaacgtggctttccatcaaaaaaatattgacaacataaaaaactttgtgttatacttgtggaattgtgagcggataacaattctatatctgttattttttccaaccacagatctatgagtaaaggagaagctgtgattaaagagttcatgcgcttcaaagttcacatggagggttctatgaacggtcacgagttcgagatcgaaggcgaaggcgagggccgtccgtatgaaggcacccagaccgccaaactgaaagtgactaaaggcggcccgctgcctttttcctgggacatcctgagcccgcaatttatgtacggttctagggcgttcatcaaacacccagcggatatcccggactattataagcagtcttttccggaaggtttcaagtgggaacgcgtaatgaattttgaagatggtggtgccgtgaccgtcactcaggacacctccctggaggatggcaccctgatctataaagttaaactgcgtggtactaattttccacctgatggcccggtgatgcagaaaaagacgatgggttgggaggcgtctaccgaacgcttgtatccggaagatggtgtgctgaaaggcgacattaaaatggccctgcgcctgaaagatggcggccgctatctggctgacttcaaaaccacgtacaaagccaagaaacctgtgcagatgcctggcgcgtacaatgtggaccgcaaactggacatcacctctcataatgaagattatacggtggtagagcaatatgagcgctccgagggtcgtcattctaccggtggcatggatgaactatacaaataagtcgaccggctgctaacaaagcccgcggccgctgaagatcgatctcgacgagtgagagaagattttcagcctgatacagattaaatcagaacgcagaagcggtctgataaaacagaatttgcctggcggcagtagcgcggtggtcccacctgaccccatgccgaactcagaagtgaaacgccgtagcgccgatggtagtgtggggtcaccccatgcgagagtagggaactgccaggcatcaaataaaacgaaaggctcagtcgaaagactgggcctttcgttttatctgttgtttgtcggtgaacgctctcctgagtaggacaaatccgccgggagcggatttgaacgttgcgaagcaacggcccggagggtggcgggcaggacgcccgccataaactgccaggcatcaaattaagcagaaggccatcctgacggatggcctttttgcgtttctacagagcgtcagaccccttaataagatgatcttcttgagatcgttttggtctgcgcgtaatctcttgctctgaaaacgaaaaaaccgccttgcagggcggtttttcgaaggttctctgagctaccaactctttgaaccgaggtaactggcttggaggagcgcagtcaccaaaacttgtcctttcagtttagccttaaccggcgcatgacttcaagactaactcctctaaatcaattaccagtggctgctgccagtggtgcttttgcatgtctttccgggttggactcaagacgatagttaccggataaggcgcagcggtcggactgaacggggggttcgtgcatacagtccagcttggagcgaactgcctacccggaactgagtgtcaggcgtggaatgagacaaacgcggccataacagcggaatgacaccggtaaaccgaaaggcaggaacaggagagcgcacgagggagccgccagggggaaacgcctggtatctttatagtcctgtcgggtttcgccaccactgatttgagcgtcagatttcgtgatgcttgtcaggggggcggagcctatggaaaaacggctttgccgcggccctctcggatctgtatggtgcactctcagtacaatctgctctgatgccgcatagttaagccagtatacactccgctatcgctacgtgactgcctcgacctgcagcaattccaacgccatcaaaaataattcgcgtctggccttcctgtagccagctttcatcaacattaaatgtgagcgagtaacaacccgtcggattctccgtgggaacaaacggcggattgaccgtaatgggataggtcacgttggtgtagatgggcgcatcgtaaccgtgcatctgccagtttgaggggacgacgacagtatcggcctcaggaagatcgcactccagccagctttccggcaccgcttctggtgccggaaaccaggcaaagcgccattcgccattcaggctgcgcaactgttgggaagggcgatcggtgcgggcctcttcgctattacgccagctggcgaaagggggatgtgctgcaaggcgattaagttgggtaacgccagggttttcccagtcacgacgttgtaaaacgacggccagtgaatccgtaatcatggtcatagctgtttcctgtgtgaaattgttatccgctcacaattccacacaacatacgagccggaagcataaagtgtaaagcctggggtgcctaatgagtgagctaacttacattaattgcgttgcgctcactgcccgctttccagtcgggaaacctgtcgtgccagctgcattaatgaatcggccaacgcgcggggagaggcggtttgcgtattgggcgccagggtggtttttcttttcaccagtgagacgggcaacagctgattgcccttcaccgcctggccctgagagagttgcagcaagcggtccacgctggtttgccccagcaggcgaaaatcctgtttgatggtggttaacggcgggatataacatgagctgtcttcggtatcgtcgtatcccactaccgagatatccgcaccaacgcgcagcccggactcggtaatggcgcgcattgcgcccagcgccatctgatcgttggcaaccagcatcgcagtgggaacgatgccctcattcagcatttgcatggtttgttgaaaaccggacatggcactccagtcgccttcccgttccgctatcggctgaatttgattgcgagtgagatatttatgccagccagccagacgcagacgcgccgagacagaacttaatgggcccgctaacagcgcgatttgctggtgacccaatgcgaccagatgctccacgcccagtcgcgtaccgtcttcatgggagaaaataatactgttgatgggtgtctggtcagagacatcaagaaataacgccggaacattagtgcaggcagcttccacagcaatggcatcctggtcatccagcggatagttaatgatcagcccactgacgcgttgcgcgagaagattgtgcaccgccgctttacaggcttcgacgccgcttcgttctaccatcgacaccaccacgctggcacccagttgatcggcgcgagatttaatcgccgcgacaatttgcgacggcgcgtgcagggccagactggaggtggcaacgccaatcagcaacgactgtttgcccgccagttgttgtgccacgcggttgggaatgtaattcagctccgccatcgccgcttccactttttcccgcgttttcgcagaaacgtggctggcctggttcaccacgcgggaaacggtctgataagagacaccggcatactctgcgacatcgtataacgttactggtttcacattcaccaccctgaattgactctcttccgggcgctatcatgccataccgcgaaaggttttgcaccattccatggtgtcggaattgctgcaggtcgagggggtcatggctgcgccccgacacccgccaacacccgctgacgcgccctgacgggcttgtctgctcccggcatccgcttacagacaagctgtgaccgtctccgggagctgcatgtgtcagaggttttcaccgtcatcaccgaaacgcgcgaggcaggatggcgcccaacagtcccccggccacggggcctgccaccatacccacgccgaaacaagcgctcatgagcccgaagtggcgagcccgatcttccccatcggtgatgtcggcgatataggcgccagcaaccgcacctgtggcgccggtgatgccggccacgatgcgtccggcgtagaggatccgtcgacctgcaggggggggggggcgctgaggtctgcctcgtgaagaaggtgttgctgactcataccaggcctgaatcgccccatcatccagccagaaagtgagggagccacggttgatgagagctttgttgtaggtggaccagttggtgattttgaacttttgctttgccacggaacggtctgcgttgtcgggaagatgcgtgatctgatccttcaactcagcaaaagttcgatttattcaacaaagccgccgtcccgtcaagtcagcgtaatgctctgccagtgttacaaccaattaaccaattctgattagaaaaactcatcgagcatcaaatgaaactgcaatttattcatatcaggattatcaataccatatttttgaaaaagccgtttctgtaatgaaggagaaaactcaccgaggcagttccataggatggcaagatcctggtatcggtctgcgattccgactcgtccaacatcaatacaacctattaatttcccctcgtcaaaaataaggttatcaagtgagaaatcaccatgagtgacgactgaatccggtgagaatggcaaaagcttatgcatttctttccagacttgttcaacaggccagccattacgctcgtcatcaaaatcactcgcatcaaccaaaccgttattcattcgtgattgcgcctgagcgagacgaaatacgcgatcgctgttaaaaggacaattacaaacaggaatcgaatgcaaccggcgcaggaacactgccagcgcatcaacaatattttcacctgaatcaggatattcttctaatacctggaatgctgttttcccggggatcgcagtggtgagtaaccatgcatcatcaggagtacggataaaatgcttgatggtcggaagaggcataaattccgtcagccagtttagtctgaccatctcatctgtaacatcattggcaacgctacctttgccatgtttcagaaacaactctggcgcatcgggcttcccatacaatcgatagattgtcgcacctgattgcccgacattatcgcgagcccatttatacccatataaatcagcatccatgttggaatttaatcgcggcctcgagcaagacgtttcccgttgaatatggctcat

SEQ ID NO: 147 - DNA, 5303 bp, Artificial
  Synthetic
aacaccccttgtattactgtttatgtaagcagacagttttattgttcatgatgatatatttttatcttgtgcaatgtaacatcagagattttgagacacaacgtggctttccatcaaaaaaatattgacaacataaaaaactttgtgttatacttgtggaattgtgagcggataacaattctatatctgttattttttccaaccacagatctatgagcaaaggtgaagaactgtttaccggcagtaaaggagaagctgtgattaaagagttcatgcgcttcaaagttcacatggagggttctatgaacggtcacgagttcgagatcgaaggcgaaggcgagggccgtccgtatgaaggcacccagaccgccaaactgaaagtgactaaaggcggcccgctgcctttttcctgggacatcctgagcccgcaatttatgtacggttctagggcgttcatcaaacacccagcggatatcccggactattataagcagtcttttccggaaggtttcaagtgggaacgcgtaatgaattttgaagatggtggtgccgtgaccgtcactcaggacacctccctggaggatggcaccctgatctataaagttaaactgcgtggtactaattttccacctgatggcccggtgatgcagaaaaagacgatgggttgggaggcgtctaccgaacgcttgtatccggaagatggtgtgctgaaaggcgacattaaaatggccctgcgcctgaaagatggcggccgctatctggctgacttcaaaaccacgtacaaagccaagaaacctgtgcagatgcctggcgcgtacaatgtggaccgcaaactggacatcacctctcataatgaagattatacggtggtagagcaatatgagcgctccgagggtcgtcattctaccggtggcatggatgaactatacaaataagtcgaccggctgctaacaaagcccgcggccgctgaagatcgatctcgacgagtgagagaagattttcagcctgatacagattaaatcagaacgcagaagcggtctgataaaacagaatttgcctggcggcagtagcgcggtggtcccacctgaccccatgccgaactcagaagtgaaacgccgtagcgccgatggtagtgtggggtcaccccatgcgagagtagggaactgccaggcatcaaataaaacgaaaggctcagtcgaaagactgggcctttcgttttatctgttgtttgtcggtgaacgctctcctgagtaggacaaatccgccgggagcggatttgaacgttgcgaagcaacggcccggagggtggcgggcaggacgcccgccataaactgccaggcatcaaattaagcagaaggccatcctgacggatggcctttttgcgtttctacagagcgtcagaccccttaataagatgatcttcttgagatcgttttggtctgcgcgtaatctcttgctctgaaaacgaaaaaaccgccttgcagggcggtttttcgaaggttctctgagctaccaactctttgaaccgaggtaactggcttggaggagcgcagtcaccaaaacttgtcctttcagtttagccttaaccggcgcatgacttcaagactaactcctctaaatcaattaccagtggctgctgccagtggtgcttttgcatgtctttccgggttggactcaagacgatagttaccggataaggcgcagcggtcggactgaacggggggttcgtgcatacagtccagcttggagcgaactgcctacccggaactgagtgtcaggcgtggaatgagacaaacgcggccataacagcggaatgacaccggtaaaccgaaaggcaggaacaggagagcgcacgagggagccgccagggggaaacgcctggtatctttatagtcctgtcgggtttcgccaccactgatttgagcgtcagatttcgtgatgcttgtcaggggggcggagcctatggaaaaacggctttgccgcggccctctcggatctgtatggtgcactctcagtacaatctgctctgatgccgcatagttaagccagtatacactccgctatcgctacgtgactgcctcgacctgcagcaattccaacgccatcaaaaataattcgcgtctggccttcctgtagccagctttcatcaacattaaatgtgagcgagtaacaacccgtcggattctccgtgggaacaaacggcggattgaccgtaatgggataggtcacgttggtgtagatgggcgcatcgtaaccgtgcatctgccagtttgaggggacgacgacagtatcggcctcaggaagatcgcactccagccagctttccggcaccgcttctggtgccggaaaccaggcaaagcgccattcgccattcaggctgcgcaactgttgggaagggcgatcggtgcgggcctcttcgctattacgccagctggcgaaagggggatgtgctgcaaggcgattaagttgggtaacgccagggttttcccagtcacgacgttgtaaaacgacggccagtgaatccgtaatcatggtcatagctgtttcctgtgtgaaattgttatccgctcacaattccacacaacatacgagccggaagcataaagtgtaaagcctggggtgcctaatgagtgagctaacttacattaattgcgttgcgctcactgcccgctttccagtcgggaaacctgtcgtgccagctgcattaatgaatcggccaacgcgcggggagaggcggtttgcgtattgggcgccagggtggtttttcttttcaccagtgagacgggcaacagctgattgcccttcaccgcctggccctgagagagttgcagcaagcggtccacgctggtttgccccagcaggcgaaaatcctgtttgatggtggttaacggcgggatataacatgagctgtcttcggtatcgtcgtatcccactaccgagatatccgcaccaacgcgcagcccggactcggtaatggcgcgcattgcgcccagcgccatctgatcgttggcaaccagcatcgcagtgggaacgatgccctcattcagcatttgcatggtttgttgaaaaccggacatggcactccagtcgccttcccgttccgctatcggctgaatttgattgcgagtgagatatttatgccagccagccagacgcagacgcgccgagacagaacttaatgggcccgctaacagcgcgatttgctggtgacccaatgcgaccagatgctccacgcccagtcgcgtaccgtcttcatgggagaaaataatactgttgatgggtgtctggtcagagacatcaagaaataacgccggaacattagtgcaggcagcttccacagcaatggcatcctggtcatccagcggatagttaatgatcagcccactgacgcgttgcgcgagaagattgtgcaccgccgctttacaggcttcgacgccgcttcgttctaccatcgacaccaccacgctggcacccagttgatcggcgcgagatttaatcgccgcgacaatttgcgacggcgcgtgcagggccagactggaggtggcaacgccaatcagcaacgactgtttgcccgccagttgttgtgccacgcggttgggaatgtaattcagctccgccatcgccgcttccactttttcccgcgttttcgcagaaacgtggctggcctggttcaccacgcgggaaacggtctgataagagacaccggcatactctgcgacatcgtataacgttactggtttcacattcaccaccctgaattgactctcttccgggcgctatcatgccataccgcgaaaggttttgcaccattccatggtgtcggaattgctgcaggtcgagggggtcatggctgcgccccgacacccgccaacacccgctgacgcgccctgacgggcttgtctgctcccggcatccgcttacagacaagctgtgaccgtctccgggagctgcatgtgtcagaggttttcaccgtcatcaccgaaacgcgcgaggcaggatggcgcccaacagtcccccggccacggggcctgccaccatacccacgccgaaacaagcgctcatgagcccgaagtggcgagcccgatcttccccatcggtgatgtcggcgatataggcgccagcaaccgcacctgtggcgccggtgatgccggccacgatgcgtccggcgtagaggatccgtcgacctgcaggggggggggggcgctgaggtctgcctcgtgaagaaggtgttgctgactcataccaggcctgaatcgccccatcatccagccagaaagtgagggagccacggttgatgagagctttgttgtaggtggaccagttggtgattttgaacttttgctttgccacggaacggtctgcgttgtcgggaagatgcgtgatctgatccttcaactcagcaaaagttcgatttattcaacaaagccgccgtcccgtcaagtcagcgtaatgctctgccagtgttacaaccaattaaccaattctgattagaaaaactcatcgagcatcaaatgaaactgcaatttattcatatcaggattatcaataccatatttttgaaaaagccgtttctgtaatgaaggagaaaactcaccgaggcagttccataggatggcaagatcctggtatcggtctgcgattccgactcgtccaacatcaatacaacctattaatttcccctcgtcaaaaataaggttatcaagtgagaaatcaccatgagtgacgactgaatccggtgagaatggcaaaagcttatgcatttctttccagacttgttcaacaggccagccattacgctcgtcatcaaaatcactcgcatcaaccaaaccgttattcattcgtgattgcgcctgagcgagacgaaatacgcgatcgctgttaaaaggacaattacaaacaggaatcgaatgcaaccggcgcaggaacactgccagcgcatcaacaatattttcacctgaatcaggatattcttctaatacctggaatgctgttttcccggggatcgcagtggtgagtaaccatgcatcatcaggagtacggataaaatgcttgatggtcggaagaggcataaattccgtcagccagtttagtctgaccatctcatctgtaacatcattggcaacgctacctttgccatgtttcagaaacaactctggcgcatcgggcttcccatacaatcgatagattgtcgcacctgattgcccgacattatcgcgagcccatttatacccatataaatcagcatccatgttggaatttaatcgcggcctcgagcaagacgtttcccgttgaatatggctcat

SEQ ID NO: 148 - DNA, 5318 bp, Artificial
  Synthetic
aacaccccttgtattactgtttatgtaagcagacagttttattgttcatgatgatatatttttatcttgtgcaatgtaacatcagagattttgagacacaacgtggctttccatcaaaaaaatattgacaacataaaaaactttgtgttatacttgtggaattgtgagcggataacaattctatatctgttattttttccaaccacagatctatgagcaaaggtgaagaactgtttaccggcgtgagcaagggcgaggaggataacatggccatcatcaaggagttcatgcgcttcaaggtgcacatggagggctccgtgaacggccacgagttcgagatcgagggcgagggcgagggccgcccctacgagggcacccagaccgccaagctgaaggtgaccaagggcggccccctgcccttcgcctgggacatcctgtcccctcagttcatgtacggctccaaggcctacgtgaagcaccccgccgacatccccgactacttgaagctgtccttccccgagggcttcaagtgggagcgcgtgatgaacttcgaggacggcggcgtggtgaccgtgacccaggactcctccctacaggacggcgagttcatctacaaggtgaagctgcgcggcaccaacttcccctccgacggccccgtaatgcagaagaagaccatgggctgggaggcctcctccgagcggatgtaccccgaggacggcgccctgaagggcgagatcaagcagaggctgaagctgaaggacggcggccactacgacgccgaggtcaagaccacctacaaggccaagaagcccgtgcagctgcccggcgcctacaacgtcaacatcaagctggacatcacctcccacaacgaggactacaccatcgtggaacagtacgagcgcgccgagggccgccactccaccggcggcatggacgagctgtacaagtaagtcgaccggctgctaacaaagcccgcggccgctgaagatcgatctcgacgagtgagagaagattttcagcctgatacagattaaatcagaacgcagaagcggtctgataaaacagaatttgcctggcggcagtagcgcggtggtcccacctgaccccatgccgaactcagaagtgaaacgccgtagcgccgatggtagtgtggggtcaccccatgcgagagtagggaactgccaggcatcaaataaaacgaaaggctcagtcgaaagactgggcctttcgttttatctgttgtttgtcggtgaacgctctcctgagtaggacaaatccgccgggagcggatttgaacgttgcgaagcaacggcccggagggtggcgggcaggacgcccgccataaactgccaggcatcaaattaagcagaaggccatcctgacggatggcctttttgcgtttctacagagcgtcagaccccttaataagatgatcttcttgagatcgttttggtctgcgcgtaatctcttgctctgaaaacgaaaaaaccgccttgcagggcggtttttcgaaggttctctgagctaccaactctttgaaccgaggtaactggcttggaggagcgcagtcaccaaaacttgtcctttcagtttagccttaaccggcgcatgacttcaagactaactcctctaaatcaattaccagtggctgctgccagtggtgcttttgcatgtctttccgggttggactcaagacgatagttaccggataaggcgcagcggtcggactgaacggggggttcgtgcatacagtccagcttggagcgaactgcctacccggaactgagtgtcaggcgtggaatgagacaaacgcggccataacagcggaatgacaccggtaaaccgaaaggcaggaacaggagagcgcacgagggagccgccagggggaaacgcctggtatctttatagtcctgtcgggtttcgccaccactgatttgagcgtcagatttcgtgatgcttgtcaggggggcggagcctatggaaaaacggctttgccgcggccctctcggatctgtatggtgcactctcagtacaatctgctctgatgccgcatagttaagccagtatacactccgctatcgctacgtgactgcctcgacctgcagcaattccaacgccatcaaaaataattcgcgtctggccttcctgtagccagctttcatcaacattaaatgtgagcgagtaacaacccgtcggattctccgtgggaacaaacggcggattgaccgtaatgggataggtcacgttggtgtagatgggcgcatcgtaaccgtgcatctgccagtttgaggggacgacgacagtatcggcctcaggaagatcgcactccagccagctttccggcaccgcttctggtgccggaaaccaggcaaagcgccattcgccattcaggctgcgcaactgttgggaagggcgatcggtgcgggcctcttcgctattacgccagctggcgaaagggggatgtgctgcaaggcgattaagttgggtaacgccagggttttcccagtcacgacgttgtaaaacgacggccagtgaatccgtaatcatggtcatagctgtttcctgtgtgaaattgttatccgctcacaattccacacaacatacgagccggaagcataaagtgtaaagcctggggtgcctaatgagtgagctaacttacattaattgcgttgcgctcactgcccgctttccagtcgggaaacctgtcgtgccagctgcattaatgaatcggccaacgcgcggggagaggcggtttgcgtattgggcgccagggtggtttttcttttcaccagtgagacgggcaacagctgattgcccttcaccgcctggccctgagagagttgcagcaagcggtccacgctggtttgccccagcaggcgaaaatcctgtttgatggtggttaacggcgggatataacatgagctgtcttcggtatcgtcgtatcccactaccgagatatccgcaccaacgcgcagcccggactcggtaatggcgcgcattgcgcccagcgccatctgatcgttggcaaccagcatcgcagtgggaacgatgccctcattcagcatttgcatggtttgttgaaaaccggacatggcactccagtcgccttcccgttccgctatcggctgaatttgattgcgagtgagatatttatgccagccagccagacgcagacgcgccgagacagaacttaatgggcccgctaacagcgcgatttgctggtgacccaatgcgaccagatgctccacgcccagtcgcgtaccgtcttcatgggagaaaataatactgttgatgggtgtctggtcagagacatcaagaaataacgccggaacattagtgcaggcagcttccacagcaatggcatcctggtcatccagcggatagttaatgatcagcccactgacgcgttgcgcgagaagattgtgcaccgccgctttacaggcttcgacgccgcttcgttctaccatcgacaccaccacgctggcacccagttgatcggcgcgagatttaatcgccgcgacaatttgcgacggcgcgtgcagggccagactggaggtggcaacgccaatcagcaacgactgtttgcccgccagttgttgtgccacgcggttgggaatgtaattcagctccgccatcgccgcttccactttttcccgcgttttcgcagaaacgtggctggcctggttcaccacgcgggaaacggtctgataagagacaccggcatactctgcgacatcgtataacgttactggtttcacattcaccaccctgaattgactctcttccgggcgctatcatgccataccgcgaaaggttttgcaccattccatggtgtcggaattgctgcaggtcgagggggtcatggctgcgccccgacacccgccaacacccgctgacgcgccctgacgggcttgtctgctcccggcatccgcttacagacaagctgtgaccgtctccgggagctgcatgtgtcagaggttttcaccgtcatcaccgaaacgcgcgaggcaggatggcgcccaacagtcccccggccacggggcctgccaccatacccacgccgaaacaagcgctcatgagcccgaagtggcgagcccgatcttccccatcggtgatgtcggcgatataggcgccagcaaccgcacctgtggcgccggtgatgccggccacgatgcgtccggcgtagaggatccgtcgacctgcaggggggggggggcgctgaggtctgcctcgtgaagaaggtgttgctgactcataccaggcctgaatcgccccatcatccagccagaaagtgagggagccacggttgatgagagctttgttgtaggtggaccagttggtgattttgaacttttgctttgccacggaacggtctgcgttgtcgggaagatgcgtgatctgatccttcaactcagcaaaagttcgatttattcaacaaagccgccgtcccgtcaagtcagcgtaatgctctgccagtgttacaaccaattaaccaattctgattagaaaaactcatcgagcatcaaatgaaactgcaatttattcatatcaggattatcaataccatatttttgaaaaagccgtttctgtaatgaaggagaaaactcaccgaggcagttccataggatggcaagatcctggtatcggtctgcgattccgactcgtccaacatcaatacaacctattaatttcccctcgtcaaaaataaggttatcaagtgagaaatcaccatgagtgacgactgaatccggtgagaatggcaaaagcttatgcatttctttccagacttgttcaacaggccagccattacgctcgtcatcaaaatcactcgcatcaaccaaaccgttattcattcgtgattgcgcctgagcgagacgaaatacgcgatcgctgttaaaaggacaattacaaacaggaatcgaatgcaaccggcgcaggaacactgccagcgcatcaacaatattttcacctgaatcaggatattcttctaatacctggaatgctgttttcccggggatcgcagtggtgagtaaccatgcatcatcaggagtacggataaaatgcttgatggtcggaagaggcataaattccgtcagccagtttagtctgaccatctcatctgtaacatcattggcaacgctacctttgccatgtttcagaaacaactctggcgcatcgggcttcccatacaatcgatagattgtcgcacctgattgcccgacattatcgcgagcccatttatacccatataaatcagcatccatgttggaatttaatcgcggcctcgagcaagacgtttcccgttgaatatggctcat

SEQ ID NO: 149 - DNA, 5276 bp, Artificial
  Synthetic
aacaccccttgtattactgtttatgtaagcagacagttttattgttcatgatgatatatttttatcttgtgcaatgtaacatcagagattttgagacacaacgtggctttccatcaaaaaaatattgacaacataaaaaactttgtgttatacttgtggaattgtgagcggataacaattctatatctgttattttttccaaccacagatctatgtctgagctgattagcgagaacatgcacatgaagctgtacatggagggcaccgtgaacgaccaccacttcaagtgcacatccgagggcgaaggcaagccctacgagggcacccagaccatgaagatcaaggtggtcgagggcggccctttacccttcgccttcgacatcctggctaccagcttcatgtacggcagcaagaccttcatcaaccacacccagggcatccccgacttctttaagcagtccttccctgagggcttcacatgggagagaatcaccacatacgaagacgggggcgtgctgaccgctacccaggacaccagcctgcagaacggctgcctgatctacaacgtcaagatcaacggggtgaacttcccatccaacggccctgtgatgcagaagaaaacactgggctgggaggccagcaccgagatgctgtaccccgctgacagcggcctgaggggccacagccagatggccctgaagttagtgggcgggggctacctgcactgcagcttgaagaccacatacagatccaagaaacccgctaagaacttgaagatgcccggcttctacttcgtggacaggaaactggaaagaatcaaggaggccgacaaagagacctacgtcgagcagcacgagatggctgtggccaggtactgcgacctgcctagcaaactggggcacagctaagtcgaccggctgctaacaaagcccgcggccgctgaagatcgatctcgacgagtgagagaagattttcagcctgatacagattaaatcagaacgcagaagcggtctgataaaacagaatttgcctggcggcagtagcgcggtggtcccacctgaccccatgccgaactcagaagtgaaacgccgtagcgccgatggtagtgtggggtcaccccatgcgagagtagggaactgccaggcatcaaataaaacgaaaggctcagtcgaaagactgggcctttcgttttatctgttgtttgtcggtgaacgctctcctgagtaggacaaatccgccgggagcggatttgaacgttgcgaagcaacggcccggagggtggcgggcaggacgcccgccataaactgccaggcatcaaattaagcagaaggccatcctgacggatggcctttttgcgtttctacagagcgtcagaccccttaataagatgatcttcttgagatcgttttggtctgcgcgtaatctcttgctctgaaaacgaaaaaaccgccttgcagggcggtttttcgaaggttctctgagctaccaactctttgaaccgaggtaactggcttggaggagcgcagtcaccaaaacttgtcctttcagtttagccttaaccggcgcatgacttcaagactaactcctctaaatcaattaccagtggctgctgccagtggtgcttttgcatgtctttccgggttggactcaagacgatagttaccggataaggcgcagcggtcggactgaacggggggttcgtgcatacagtccagcttggagcgaactgcctacccggaactgagtgtcaggcgtggaatgagacaaacgcggccataacagcggaatgacaccggtaaaccgaaaggcaggaacaggagagcgcacgagggagccgccagggggaaacgcctggtatctttatagtcctgtcgggtttcgccaccactgatttgagcgtcagatttcgtgatgcttgtcaggggggcggagcctatggaaaaacggctttgccgcggccctctcggatctgtatggtgcactctcagtacaatctgctctgatgccgcatagttaagccagtatacactccgctatcgctacgtgactgcctcgacctgcagcaattccaacgccatcaaaaataattcgcgtctggccttcctgtagccagctttcatcaacattaaatgtgagcgagtaacaacccgtcggattctccgtgggaacaaacggcggattgaccgtaatgggataggtcacgttggtgtagatgggcgcatcgtaaccgtgcatctgccagtttgaggggacgacgacagtatcggcctcaggaagatcgcactccagccagctttccggcaccgcttctggtgccggaaaccaggcaaagcgccattcgccattcaggctgcgcaactgttgggaagggcgatcggtgcgggcctcttcgctattacgccagctggcgaaagggggatgtgctgcaaggcgattaagttgggtaacgccagggttttcccagtcacgacgttgtaaaacgacggccagtgaatccgtaatcatggtcatagctgtttcctgtgtgaaattgttatccgctcacaattccacacaacatacgagccggaagcataaagtgtaaagcctggggtgcctaatgagtgagctaacttacattaattgcgttgcgctcactgcccgctttccagtcgggaaacctgtcgtgccagctgcattaatgaatcggccaacgcgcggggagaggcggtttgcgtattgggcgccagggtggtttttcttttcaccagtgagacgggcaacagctgattgcccttcaccgcctggccctgagagagttgcagcaagcggtccacgctggtttgccccagcaggcgaaaatcctgtttgatggtggttaacggcgggatataacatgagctgtcttcggtatcgtcgtatcccactaccgagatatccgcaccaacgcgcagcccggactcggtaatggcgcgcattgcgcccagcgccatctgatcgttggcaaccagcatcgcagtgggaacgatgccctcattcagcatttgcatggtttgttgaaaaccggacatggcactccagtcgccttcccgttccgctatcggctgaatttgattgcgagtgagatatttatgccagccagccagacgcagacgcgccgagacagaacttaatgggcccgctaacagcgcgatttgctggtgacccaatgcgaccagatgctccacgcccagtcgcgtaccgtcttcatgggagaaaataatactgttgatgggtgtctggtcagagacatcaagaaataacgccggaacattagtgcaggcagcttccacagcaatggcatcctggtcatccagcggatagttaatgatcagcccactgacgcgttgcgcgagaagattgtgcaccgccgctttacaggcttcgacgccgcttcgttctaccatcgacaccaccacgctggcacccagttgatcggcgcgagatttaatcgccgcgacaatttgcgacggcgcgtgcagggccagactggaggtggcaacgccaatcagcaacgactgtttgcccgccagttgttgtgccacgcggttgggaatgtaattcagctccgccatcgccgcttccactttttcccgcgttttcgcagaaacgtggctggcctggttcaccacgcgggaaacggtctgataagagacaccggcatactctgcgacatcgtataacgttactggtttcacattcaccaccctgaattgactctcttccgggcgctatcatgccataccgcgaaaggttttgcaccattccatggtgtcggaattgctgcaggtcgagggggtcatggctgcgccccgacacccgccaacacccgctgacgcgccctgacgggcttgtctgctcccggcatccgcttacagacaagctgtgaccgtctccgggagctgcatgtgtcagaggttttcaccgtcatcaccgaaacgcgcgaggcaggatggcgcccaacagtcccccggccacggggcctgccaccatacccacgccgaaacaagcgctcatgagcccgaagtggcgagcccgatcttccccatcggtgatgtcggcgatataggcgccagcaaccgcacctgtggcgccggtgatgccggccacgatgcgtccggcgtagaggatccgtcgacctgcaggggggggggggcgctgaggtctgcctcgtgaagaaggtgttgctgactcataccaggcctgaatcgccccatcatccagccagaaagtgagggagccacggttgatgagagctttgttgtaggtggaccagttggtgattttgaacttttgctttgccacggaacggtctgcgttgtcgggaagatgcgtgatctgatccttcaactcagcaaaagttcgatttattcaacaaagccgccgtcccgtcaagtcagcgtaatgctctgccagtgttacaaccaattaaccaattctgattagaaaaactcatcgagcatcaaatgaaactgcaatttattcatatcaggattatcaataccatatttttgaaaaagccgtttctgtaatgaaggagaaaactcaccgaggcagttccataggatggcaagatcctggtatcggtctgcgattccgactcgtccaacatcaatacaacctattaatttcccctcgtcaaaaataaggttatcaagtgagaaatcaccatgagtgacgactgaatccggtgagaatggcaaaagcttatgcatttctttccagacttgttcaacaggccagccattacgctcgtcatcaaaatcactcgcatcaaccaaaccgttattcattcgtgattgcgcctgagcgagacgaaatacgcgatcgctgttaaaaggacaattacaaacaggaatcgaatgcaaccggcgcaggaacactgccagcgcatcaacaatattttcacctgaatcaggatattcttctaatacctggaatgctgttttcccggggatcgcagtggtgagtaaccatgcatcatcaggagtacggataaaatgcttgatggtcggaagaggcataaattccgtcagccagtttagtctgaccatctcatctgtaacatcattggcaacgctacctttgccatgtttcagaaacaactctggcgcatcgggcttcccatacaatcgatagattgtcgcacctgattgcccgacattatcgcgagcccatttatacccatataaatcagcatccatgttggaatttaatcgcggcctcgagcaagacgtttcccgttgaatatggctcat

SEQ ID NO: 150 - DNA, 5303 bp, Artificial
  Synthetic
aacaccccttgtattactgtttatgtaagcagacagttttattgttcatgatgatatatttttatcttgtgcaatgtaacatcagagattttgagacacaacgtggctttccatcaaaaaaatattgacaacataaaaaactttgtgttatacttgtggaattgtgagcggataacaattctatatctgttattttttccaaccacagatctatgagcaaaggtgaagaactgtttaccggctctgagctgattagcgagaacatgcacatgaagctgtacatggagggcaccgtgaacgaccaccacttcaagtgcacatccgagggcgaaggcaagccctacgagggcacccagaccatgaagatcaaggtggtcgagggcggccctttacccttcgccttcgacatcctggctaccagcttcatgtacggcagcaagaccttcatcaaccacacccagggcatccccgacttctttaagcagtccttccctgagggcttcacatgggagagaatcaccacatacgaagacgggggcgtgctgaccgctacccaggacaccagcctgcagaacggctgcctgatctacaacgtcaagatcaacggggtgaacttcccatccaacggccctgtgatgcagaagaaaacactgggctgggaggccagcaccgagatgctgtaccccgctgacagcggcctgaggggccacagccagatggccctgaagttagtgggcgggggctacctgcactgcagcttgaagaccacatacagatccaagaaacccgctaagaacttgaagatgcccggcttctacttcgtggacaggaaactggaaagaatcaaggaggccgacaaagagacctacgtcgagcagcacgagatggctgtggccaggtactgcgacctgcctagcaaactggggcacagctaagtcgaccggctgctaacaaagcccgcggccgctgaagatcgatctcgacgagtgagagaagattttcagcctgatacagattaaatcagaacgcagaagcggtctgataaaacagaatttgcctggcggcagtagcgcggtggtcccacctgaccccatgccgaactcagaagtgaaacgccgtagcgccgatggtagtgtggggtcaccccatgcgagagtagggaactgccaggcatcaaataaaacgaaaggctcagtcgaaagactgggcctttcgttttatctgttgtttgtcggtgaacgctctcctgagtaggacaaatccgccgggagcggatttgaacgttgcgaagcaacggcccggagggtggcgggcaggacgcccgccataaactgccaggcatcaaattaagcagaaggccatcctgacggatggcctttttgcgtttctacagagcgtcagaccccttaataagatgatcttcttgagatcgttttggtctgcgcgtaatctcttgctctgaaaacgaaaaaaccgccttgcagggcggtttttcgaaggttctctgagctaccaactctttgaaccgaggtaactggcttggaggagcgcagtcaccaaaacttgtcctttcagtttagccttaaccggcgcatgacttcaagactaactcctctaaatcaattaccagtggctgctgccagtggtgcttttgcatgtctttccgggttggactcaagacgatagttaccggataaggcgcagcggtcggactgaacggggggttcgtgcatacagtccagcttggagcgaactgcctacccggaactgagtgtcaggcgtggaatgagacaaacgcggccataacagcggaatgacaccggtaaaccgaaaggcaggaacaggagagcgcacgagggagccgccagggggaaacgcctggtatctttatagtcctgtcgggtttcgccaccactgatttgagcgtcagatttcgtgatgcttgtcaggggggcggagcctatggaaaaacggctttgccgcggccctctcggatctgtatggtgcactctcagtacaatctgctctgatgccgcatagttaagccagtatacactccgctatcgctacgtgactgcctcgacctgcagcaattccaacgccatcaaaaataattcgcgtctggccttcctgtagccagctttcatcaacattaaatgtgagcgagtaacaacccgtcggattctccgtgggaacaaacggcggattgaccgtaatgggataggtcacgttggtgtagatgggcgcatcgtaaccgtgcatctgccagtttgaggggacgacgacagtatcggcctcaggaagatcgcactccagccagctttccggcaccgcttctggtgccggaaaccaggcaaagcgccattcgccattcaggctgcgcaactgttgggaagggcgatcggtgcgggcctcttcgctattacgccagctggcgaaagggggatgtgctgcaaggcgattaagttgggtaacgccagggttttcccagtcacgacgttgtaaaacgacggccagtgaatccgtaatcatggtcatagctgtttcctgtgtgaaattgttatccgctcacaattccacacaacatacgagccggaagcataaagtgtaaagcctggggtgcctaatgagtgagctaacttacattaattgcgttgcgctcactgcccgctttccagtcgggaaacctgtcgtgccagctgcattaatgaatcggccaacgcgcggggagaggcggtttgcgtattgggcgccagggtggtttttcttttcaccagtgagacgggcaacagctgattgcccttcaccgcctggccctgagagagttgcagcaagcggtccacgctggtttgccccagcaggcgaaaatcctgtttgatggtggttaacggcgggatataacatgagctgtcttcggtatcgtcgtatcccactaccgagatatccgcaccaacgcgcagcccggactcggtaatggcgcgcattgcgcccagcgccatctgatcgttggcaaccagcatcgcagtgggaacgatgccctcattcagcatttgcatggtttgttgaaaaccggacatggcactccagtcgccttcccgttccgctatcggctgaatttgattgcgagtgagatatttatgccagccagccagacgcagacgcgccgagacagaacttaatgggcccgctaacagcgcgatttgctggtgacccaatgcgaccagatgctccacgcccagtcgcgtaccgtcttcatgggagaaaataatactgttgatgggtgtctggtcagagacatcaagaaataacgccggaacattagtgcaggcagcttccacagcaatggcatcctggtcatccagcggatagttaatgatcagcccactgacgcgttgcgcgagaagattgtgcaccgccgctttacaggcttcgacgccgcttcgttctaccatcgacaccaccacgctggcacccagttgatcggcgcgagatttaatcgccgcgacaatttgcgacggcgcgtgcagggccagactggaggtggcaacgccaatcagcaacgactgtttgcccgccagttgttgtgccacgcggttgggaatgtaattcagctccgccatcgccgcttccactttttcccgcgttttcgcagaaacgtggctggcctggttcaccacgcgggaaacggtctgataagagacaccggcatactctgcgacatcgtataacgttactggtttcacattcaccaccctgaattgactctcttccgggcgctatcatgccataccgcgaaaggttttgcaccattccatggtgtcggaattgctgcaggtcgagggggtcatggctgcgccccgacacccgccaacacccgctgacgcgccctgacgggcttgtctgctcccggcatccgcttacagacaagctgtgaccgtctccgggagctgcatgtgtcagaggttttcaccgtcatcaccgaaacgcgcgaggcaggatggcgcccaacagtcccccggccacggggcctgccaccatacccacgccgaaacaagcgctcatgagcccgaagtggcgagcccgatcttccccatcggtgatgtcggcgatataggcgccagcaaccgcacctgtggcgccggtgatgccggccacgatgcgtccggcgtagaggatccgtcgacctgcaggggggggggggcgctgaggtctgcctcgtgaagaaggtgttgctgactcataccaggcctgaatcgccccatcatccagccagaaagtgagggagccacggttgatgagagctttgttgtaggtggaccagttggtgattttgaacttttgctttgccacggaacggtctgcgttgtcgggaagatgcgtgatctgatccttcaactcagcaaaagttcgatttattcaacaaagccgccgtcccgtcaagtcagcgtaatgctctgccagtgttacaaccaattaaccaattctgattagaaaaactcatcgagcatcaaatgaaactgcaatttattcatatcaggattatcaataccatatttttgaaaaagccgtttctgtaatgaaggagaaaactcaccgaggcagttccataggatggcaagatcctggtatcggtctgcgattccgactcgtccaacatcaatacaacctattaatttcccctcgtcaaaaataaggttatcaagtgagaaatcaccatgagtgacgactgaatccggtgagaatggcaaaagcttatgcatttctttccagacttgttcaacaggccagccattacgctcgtcatcaaaatcactcgcatcaaccaaaccgttattcattcgtgattgcgcctgagcgagacgaaatacgcgatcgctgttaaaaggacaattacaaacaggaatcgaatgcaaccggcgcaggaacactgccagcgcatcaacaatattttcacctgaatcaggatattcttctaatacctggaatgctgttttcccggggatcgcagtggtgagtaaccatgcatcatcaggagtacggataaaatgcttgatggtcggaagaggcataaattccgtcagccagtttagtctgaccatctcatctgtaacatcattggcaacgctacctttgccatgtttcagaaacaactctggcgcatcgggcttcccatacaatcgatagattgtcgcacctgattgcccgacattatcgcgagcccatttatacccatataaatcagcatccatgttggaatttaatcgcggcctcgagcaagacgtttcccgttgaatatggctcat

SEQ ID NO: 151 - DNA, 5315 bp, Artificial
  Synthetic
aacaccccttgtattactgtttatgtaagcagacagttttattgttcatgatgatatatttttatcttgtgcaatgtaacatcagagattttgagacacaacgtggctttccatcaaaaaaatattgacaacataaaaaactttgtgttatacttgtggaattgtgagcggataacaattctatatctgttattttttccaaccacagatctatggtgtctaagggcgaagagctgattaaggagaacatgcacatgaagctgtacatggagggcaccgtgaacaaccaccacttcaagtgcacatccgagggcgaaggcaagccctacgagggcacccagacccagagaatcaaggtggtcgagggcggccctctccccttcgccttcgacatcctggctaccagcttcatgtacggcagcaagaccttcatcaaccacacccagggcatccccgatttctttaagcagtccttccctgagggcttcacatgggagagagtcaccacatacgaagacgggggcgtgctgaaggtgaaacaggacaccagcctccaggacggctgcctcatctacaacgtcaagatcagaggggtgaacttcccatccaacggccctgtgatgcagaagaaaacactcggctgggaggccaacaccgagaccctgtaccccgctgacggcggcctgcgcggctataacacgatggccctgaagctcgtgggcgggggccacctgcagacgttcctcaagaccacatacagatccaagaaacccgctaagaacctcaagatgcccggcgtctactttgtggaccgcagactggaaagaatcaaggaggccgacaaagagacctacgtcgagcagcacgaggtggctgtggccagatactgcgacctccctagcaaactggggcacaaacttaatggcatggacgagctgtacaagtaagtcgaccggctgctaacaaagcccgcggccgctgaagatcgatctcgacgagtgagagaagattttcagcctgatacagattaaatcagaacgcagaagcggtctgataaaacagaatttgcctggcggcagtagcgcggtggtcccacctgaccccatgccgaactcagaagtgaaacgccgtagcgccgatggtagtgtggggtcaccccatgcgagagtagggaactgccaggcatcaaataaaacgaaaggctcagtcgaaagactgggcctttcgttttatctgttgtttgtcggtgaacgctctcctgagtaggacaaatccgccgggagcggatttgaacgttgcgaagcaacggcccggagggtggcgggcaggacgcccgccataaactgccaggcatcaaattaagcagaaggccatcctgacggatggcctttttgcgtttctacagagcgtcagaccccttaataagatgatcttcttgagatcgttttggtctgcgcgtaatctcttgctctgaaaacgaaaaaaccgccttgcagggcggtttttcgaaggttctctgagctaccaactctttgaaccgaggtaactggcttggaggagcgcagtcaccaaaacttgtcctttcagtttagccttaaccggcgcatgacttcaagactaactcctctaaatcaattaccagtggctgctgccagtggtgcttttgcatgtctttccgggttggactcaagacgatagttaccggataaggcgcagcggtcggactgaacggggggttcgtgcatacagtccagcttggagcgaactgcctacccggaactgagtgtcaggcgtggaatgagacaaacgcggccataacagcggaatgacaccggtaaaccgaaaggcaggaacaggagagcgcacgagggagccgccagggggaaacgcctggtatctttatagtcctgtcgggtttcgccaccactgatttgagcgtcagatttcgtgatgcttgtcaggggggcggagcctatggaaaaacggctttgccgcggccctctcggatctgtatggtgcactctcagtacaatctgctctgatgccgcatagttaagccagtatacactccgctatcgctacgtgactgcctcgacctgcagcaattccaacgccatcaaaaataattcgcgtctggccttcctgtagccagctttcatcaacattaaatgtgagcgagtaacaacccgtcggattctccgtgggaacaaacggcggattgaccgtaatgggataggtcacgttggtgtagatgggcgcatcgtaaccgtgcatctgccagtttgaggggacgacgacagtatcggcctcaggaagatcgcactccagccagctttccggcaccgcttctggtgccggaaaccaggcaaagcgccattcgccattcaggctgcgcaactgttgggaagggcgatcggtgcgggcctcttcgctattacgccagctggcgaaagggggatgtgctgcaaggcgattaagttgggtaacgccagggttttcccagtcacgacgttgtaaaacgacggccagtgaatccgtaatcatggtcatagctgtttcctgtgtgaaattgttatccgctcacaattccacacaacatacgagccggaagcataaagtgtaaagcctggggtgcctaatgagtgagctaacttacattaattgcgttgcgctcactgcccgctttccagtcgggaaacctgtcgtgccagctgcattaatgaatcggccaacgcgcggggagaggcggtttgcgtattgggcgccagggtggtttttcttttcaccagtgagacgggcaacagctgattgcccttcaccgcctggccctgagagagttgcagcaagcggtccacgctggtttgccccagcaggcgaaaatcctgtttgatggtggttaacggcgggatataacatgagctgtcttcggtatcgtcgtatcccactaccgagatatccgcaccaacgcgcagcccggactcggtaatggcgcgcattgcgcccagcgccatctgatcgttggcaaccagcatcgcagtgggaacgatgccctcattcagcatttgcatggtttgttgaaaaccggacatggcactccagtcgccttcccgttccgctatcggctgaatttgattgcgagtgagatatttatgccagccagccagacgcagacgcgccgagacagaacttaatgggcccgctaacagcgcgatttgctggtgacccaatgcgaccagatgctccacgcccagtcgcgtaccgtcttcatgggagaaaataatactgttgatgggtgtctggtcagagacatcaagaaataacgccggaacattagtgcaggcagcttccacagcaatggcatcctggtcatccagcggatagttaatgatcagcccactgacgcgttgcgcgagaagattgtgcaccgccgctttacaggcttcgacgccgcttcgttctaccatcgacaccaccacgctggcacccagttgatcggcgcgagatttaatcgccgcgacaatttgcgacggcgcgtgcagggccagactggaggtggcaacgccaatcagcaacgactgtttgcccgccagttgttgtgccacgcggttgggaatgtaattcagctccgccatcgccgcttccactttttcccgcgttttcgcagaaacgtggctggcctggttcaccacgcgggaaacggtctgataagagacaccggcatactctgcgacatcgtataacgttactggtttcacattcaccaccctgaattgactctcttccgggcgctatcatgccataccgcgaaaggttttgcaccattccatggtgtcggaattgctgcaggtcgagggggtcatggctgcgccccgacacccgccaacacccgctgacgcgccctgacgggcttgtctgctcccggcatccgcttacagacaagctgtgaccgtctccgggagctgcatgtgtcagaggttttcaccgtcatcaccgaaacgcgcgaggcaggatggcgcccaacagtcccccggccacggggcctgccaccatacccacgccgaaacaagcgctcatgagcccgaagtggcgagcccgatcttccccatcggtgatgtcggcgatataggcgccagcaaccgcacctgtggcgccggtgatgccggccacgatgcgtccggcgtagaggatccgtcgacctgcaggggggggggggcgctgaggtctgcctcgtgaagaaggtgttgctgactcataccaggcctgaatcgccccatcatccagccagaaagtgagggagccacggttgatgagagctttgttgtaggtggaccagttggtgattttgaacttttgctttgccacggaacggtctgcgttgtcgggaagatgcgtgatctgatccttcaactcagcaaaagttcgatttattcaacaaagccgccgtcccgtcaagtcagcgtaatgctctgccagtgttacaaccaattaaccaattctgattagaaaaactcatcgagcatcaaatgaaactgcaatttattcatatcaggattatcaataccatatttttgaaaaagccgtttctgtaatgaaggagaaaactcaccgaggcagttccataggatggcaagatcctggtatcggtctgcgattccgactcgtccaacatcaatacaacctattaatttcccctcgtcaaaaataaggttatcaagtgagaaatcaccatgagtgacgactgaatccggtgagaatggcaaaagcttatgcatttctttccagacttgttcaacaggccagccattacgctcgtcatcaaaatcactcgcatcaaccaaaccgttattcattcgtgattgcgcctgagcgagacgaaatacgcgatcgctgttaaaaggacaattacaaacaggaatcgaatgcaaccggcgcaggaacactgccagcgcatcaacaatattttcacctgaatcaggatattcttctaatacctggaatgctgttttcccggggatcgcagtggtgagtaaccatgcatcatcaggagtacggataaaatgcttgatggtcggaagaggcataaattccgtcagccagtttagtctgaccatctcatctgtaacatcattggcaacgctacctttgccatgtttcagaaacaactctggcgcatcgggcttcccatacaatcgatagattgtcgcacctgattgcccgacattatcgcgagcccatttatacccatataaatcagcatccatgttggaatttaatcgcggcctcgagcaagacgtttcccgttgaatatggctcat

SEQ ID NO: 152 - DNA, 5342 bp, Artificial
  Synthetic
aacaccccttgtattactgtttatgtaagcagacagttttattgttcatgatgatatatttttatcttgtgcaatgtaacatcagagattttgagacacaacgtggctttccatcaaaaaaatattgacaacataaaaaactttgtgttatacttgtggaattgtgagcggataacaattctatatctgttattttttccaaccacagatctatgagcaaaggtgaagaactgtttaccggcgtgtctaagggcgaagagctgattaaggagaacatgcacatgaagctgtacatggagggcaccgtgaacaaccaccacttcaagtgcacatccgagggcgaaggcaagccctacgagggcacccagacccagagaatcaaggtggtcgagggcggccctctccccttcgccttcgacatcctggctaccagcttcatgtacggcagcaagaccttcatcaaccacacccagggcatccccgatttctttaagcagtccttccctgagggcttcacatgggagagagtcaccacatacgaagacgggggcgtgctgaaggtgaaacaggacaccagcctccaggacggctgcctcatctacaacgtcaagatcagaggggtgaacttcccatccaacggccctgtgatgcagaagaaaacactcggctgggaggccaacaccgagaccctgtaccccgctgacggcggcctgcgcggctataacacgatggccctgaagctcgtgggcgggggccacctgcagacgttcctcaagaccacatacagatccaagaaacccgctaagaacctcaagatgcccggcgtctactttgtggaccgcagactggaaagaatcaaggaggccgacaaagagacctacgtcgagcagcacgaggtggctgtggccagatactgcgacctccctagcaaactggggcacaaacttaatggcatggacgagctgtacaagtaagtcgaccggctgctaacaaagcccgcggccgctgaagatcgatctcgacgagtgagagaagattttcagcctgatacagattaaatcagaacgcagaagcggtctgataaaacagaatttgcctggcggcagtagcgcggtggtcccacctgaccccatgccgaactcagaagtgaaacgccgtagcgccgatggtagtgtggggtcaccccatgcgagagtagggaactgccaggcatcaaataaaacgaaaggctcagtcgaaagactgggcctttcgttttatctgttgtttgtcggtgaacgctctcctgagtaggacaaatccgccgggagcggatttgaacgttgcgaagcaacggcccggagggtggcgggcaggacgcccgccataaactgccaggcatcaaattaagcagaaggccatcctgacggatggcctttttgcgtttctacagagcgtcagaccccttaataagatgatcttcttgagatcgttttggtctgcgcgtaatctcttgctctgaaaacgaaaaaaccgccttgcagggcggtttttcgaaggttctctgagctaccaactctttgaaccgaggtaactggcttggaggagcgcagtcaccaaaacttgtcctttcagtttagccttaaccggcgcatgacttcaagactaactcctctaaatcaattaccagtggctgctgccagtggtgcttttgcatgtctttccgggttggactcaagacgatagttaccggataaggcgcagcggtcggactgaacggggggttcgtgcatacagtccagcttggagcgaactgcctacccggaactgagtgtcaggcgtggaatgagacaaacgcggccataacagcggaatgacaccggtaaaccgaaaggcaggaacaggagagcgcacgagggagccgccagggggaaacgcctggtatctttatagtcctgtcgggtttcgccaccactgatttgagcgtcagatttcgtgatgcttgtcaggggggcggagcctatggaaaaacggctttgccgcggccctctcggatctgtatggtgcactctcagtacaatctgctctgatgccgcatagttaagccagtatacactccgctatcgctacgtgactgcctcgacctgcagcaattccaacgccatcaaaaataattcgcgtctggccttcctgtagccagctttcatcaacattaaatgtgagcgagtaacaacccgtcggattctccgtgggaacaaacggcggattgaccgtaatgggataggtcacgttggtgtagatgggcgcatcgtaaccgtgcatctgccagtttgaggggacgacgacagtatcggcctcaggaagatcgcactccagccagctttccggcaccgcttctggtgccggaaaccaggcaaagcgccattcgccattcaggctgcgcaactgttgggaagggcgatcggtgcgggcctcttcgctattacgccagctggcgaaagggggatgtgctgcaaggcgattaagttgggtaacgccagggttttcccagtcacgacgttgtaaaacgacggccagtgaatccgtaatcatggtcatagctgtttcctgtgtgaaattgttatccgctcacaattccacacaacatacgagccggaagcataaagtgtaaagcctggggtgcctaatgagtgagctaacttacattaattgcgttgcgctcactgcccgctttccagtcgggaaacctgtcgtgccagctgcattaatgaatcggccaacgcgcggggagaggcggtttgcgtattgggcgccagggtggtttttcttttcaccagtgagacgggcaacagctgattgcccttcaccgcctggccctgagagagttgcagcaagcggtccacgctggtttgccccagcaggcgaaaatcctgtttgatggtggttaacggcgggatataacatgagctgtcttcggtatcgtcgtatcccactaccgagatatccgcaccaacgcgcagcccggactcggtaatggcgcgcattgcgcccagcgccatctgatcgttggcaaccagcatcgcagtgggaacgatgccctcattcagcatttgcatggtttgttgaaaaccggacatggcactccagtcgccttcccgttccgctatcggctgaatttgattgcgagtgagatatttatgccagccagccagacgcagacgcgccgagacagaacttaatgggcccgctaacagcgcgatttgctggtgacccaatgcgaccagatgctccacgcccagtcgcgtaccgtcttcatgggagaaaataatactgttgatgggtgtctggtcagagacatcaagaaataacgccggaacattagtgcaggcagcttccacagcaatggcatcctggtcatccagcggatagttaatgatcagcccactgacgcgttgcgcgagaagattgtgcaccgccgctttacaggcttcgacgccgcttcgttctaccatcgacaccaccacgctggcacccagttgatcggcgcgagatttaatcgccgcgacaatttgcgacggcgcgtgcagggccagactggaggtggcaacgccaatcagcaacgactgtttgcccgccagttgttgtgccacgcggttgggaatgtaattcagctccgccatcgccgcttccactttttcccgcgttttcgcagaaacgtggctggcctggttcaccacgcgggaaacggtctgataagagacaccggcatactctgcgacatcgtataacgttactggtttcacattcaccaccctgaattgactctcttccgggcgctatcatgccataccgcgaaaggttttgcaccattccatggtgtcggaattgctgcaggtcgagggggtcatggctgcgccccgacacccgccaacacccgctgacgcgccctgacgggcttgtctgctcccggcatccgcttacagacaagctgtgaccgtctccgggagctgcatgtgtcagaggttttcaccgtcatcaccgaaacgcgcgaggcaggatggcgcccaacagtcccccggccacggggcctgccaccatacccacgccgaaacaagcgctcatgagcccgaagtggcgagcccgatcttccccatcggtgatgtcggcgatataggcgccagcaaccgcacctgtggcgccggtgatgccggccacgatgcgtccggcgtagaggatccgtcgacctgcaggggggggggggcgctgaggtctgcctcgtgaagaaggtgttgctgactcataccaggcctgaatcgccccatcatccagccagaaagtgagggagccacggttgatgagagctttgttgtaggtggaccagttggtgattttgaacttttgctttgccacggaacggtctgcgttgtcgggaagatgcgtgatctgatccttcaactcagcaaaagttcgatttattcaacaaagccgccgtcccgtcaagtcagcgtaatgctctgccagtgttacaaccaattaaccaattctgattagaaaaactcatcgagcatcaaatgaaactgcaatttattcatatcaggattatcaataccatatttttgaaaaagccgtttctgtaatgaaggagaaaactcaccgaggcagttccataggatggcaagatcctggtatcggtctgcgattccgactcgtccaacatcaatacaacctattaatttcccctcgtcaaaaataaggttatcaagtgagaaatcaccatgagtgacgactgaatccggtgagaatggcaaaagcttatgcatttctttccagacttgttcaacaggccagccattacgctcgtcatcaaaatcactcgcatcaaccaaaccgttattcattcgtgattgcgcctgagcgagacgaaatacgcgatcgctgttaaaaggacaattacaaacaggaatcgaatgcaaccggcgcaggaacactgccagcgcatcaacaatattttcacctgaatcaggatattcttctaatacctggaatgctgttttcccggggatcgcagtggtgagtaaccatgcatcatcaggagtacggataaaatgcttgatggtcggaagaggcataaattccgtcagccagtttagtctgaccatctcatctgtaacatcattggcaacgctacctttgccatgtttcagaaacaactctggcgcatcgggcttcccatacaatcgatagattgtcgcacctgattgcccgacattatcgcgagcccatttatacccatataaatcagcatccatgttggaatttaatcgcggcctcgagcaagacgtttcccgttgaatatggctcat

SEQ ID NO: 153 - DNA, 5282 bp, Artificial
  Synthetic
aacaccccttgtattactgtttatgtaagcagacagttttattgttcatgatgatatatttttatcttgtgcaatgtaacatcagagattttgagacacaacgtggctttccatcaaaaaaatattgacaacataaaaaactttgtgttatacttgtggaattgtgagcggataacaattctatatctgttattttttccaaccacagatctatgagcgagctgattaaggagaacatgcacatgaagctgtacatggaaggcaccgtgaacaaccaccacttcaagtgcacatccgagggcgaaggcaagccctacgagggcacccagaccatgagaatcaaggtggtcgagggcggccctctacccttcgccttcgacatcttggctaccagcttcatgtacggcagctacaccttcatcaaccacacccagggcatccccgacttctttaagcagtccttccctgagggcttcacatgggagagagtcaccacatacgaagacgggggcgtgctgaccgctacccaggacaccagcctccaggacggttgcctcatctacaacgtcaagatcagaggggtgaacttcacatccaacggccctgtgatgcagaagaaaacactcggctgggaggccggcaccgagatgctgtaccccgctgacggcggcctggaaggcagatctgacgacgccctgaagctcgtgggcgggggccacctgatctgcaacttgaagagcacatacagatccaagaaacccgctaagaatctcaaggtgcccggcgtctactatgtggaccgaagactggaaagaatcaaggaggccgacaaagagacctacgtcgagcagcacgaggtggctgtggccagatactgcgacctccctagcaaactggggcacaagcttaattaagtcgaccggctgctaacaaagcccgcggccgctgaagatcgatctcgacgagtgagagaagattttcagcctgatacagattaaatcagaacgcagaagcggtctgataaaacagaatttgcctggcggcagtagcgcggtggtcccacctgaccccatgccgaactcagaagtgaaacgccgtagcgccgatggtagtgtggggtcaccccatgcgagagtagggaactgccaggcatcaaataaaacgaaaggctcagtcgaaagactgggcctttcgttttatctgttgtttgtcggtgaacgctctcctgagtaggacaaatccgccgggagcggatttgaacgttgcgaagcaacggcccggagggtggcgggcaggacgcccgccataaactgccaggcatcaaattaagcagaaggccatcctgacggatggcctttttgcgtttctacagagcgtcagaccccttaataagatgatcttcttgagatcgttttggtctgcgcgtaatctcttgctctgaaaacgaaaaaaccgccttgcagggcggtttttcgaaggttctctgagctaccaactctttgaaccgaggtaactggcttggaggagcgcagtcaccaaaacttgtcctttcagtttagccttaaccggcgcatgacttcaagactaactcctctaaatcaattaccagtggctgctgccagtggtgcttttgcatgtctttccgggttggactcaagacgatagttaccggataaggcgcagcggtcggactgaacggggggttcgtgcatacagtccagcttggagcgaactgcctacccggaactgagtgtcaggcgtggaatgagacaaacgcggccataacagcggaatgacaccggtaaaccgaaaggcaggaacaggagagcgcacgagggagccgccagggggaaacgcctggtatctttatagtcctgtcgggtttcgccaccactgatttgagcgtcagatttcgtgatgcttgtcaggggggcggagcctatggaaaaacggctttgccgcggccctctcggatctgtatggtgcactctcagtacaatctgctctgatgccgcatagttaagccagtatacactccgctatcgctacgtgactgcctcgacctgcagcaattccaacgccatcaaaaataattcgcgtctggccttcctgtagccagctttcatcaacattaaatgtgagcgagtaacaacccgtcggattctccgtgggaacaaacggcggattgaccgtaatgggataggtcacgttggtgtagatgggcgcatcgtaaccgtgcatctgccagtttgaggggacgacgacagtatcggcctcaggaagatcgcactccagccagctttccggcaccgcttctggtgccggaaaccaggcaaagcgccattcgccattcaggctgcgcaactgttgggaagggcgatcggtgcgggcctcttcgctattacgccagctggcgaaagggggatgtgctgcaaggcgattaagttgggtaacgccagggttttcccagtcacgacgttgtaaaacgacggccagtgaatccgtaatcatggtcatagctgtttcctgtgtgaaattgttatccgctcacaattccacacaacatacgagccggaagcataaagtgtaaagcctggggtgcctaatgagtgagctaacttacattaattgcgttgcgctcactgcccgctttccagtcgggaaacctgtcgtgccagctgcattaatgaatcggccaacgcgcggggagaggcggtttgcgtattgggcgccagggtggtttttcttttcaccagtgagacgggcaacagctgattgcccttcaccgcctggccctgagagagttgcagcaagcggtccacgctggtttgccccagcaggcgaaaatcctgtttgatggtggttaacggcgggatataacatgagctgtcttcggtatcgtcgtatcccactaccgagatatccgcaccaacgcgcagcccggactcggtaatggcgcgcattgcgcccagcgccatctgatcgttggcaaccagcatcgcagtgggaacgatgccctcattcagcatttgcatggtttgttgaaaaccggacatggcactccagtcgccttcccgttccgctatcggctgaatttgattgcgagtgagatatttatgccagccagccagacgcagacgcgccgagacagaacttaatgggcccgctaacagcgcgatttgctggtgacccaatgcgaccagatgctccacgcccagtcgcgtaccgtcttcatgggagaaaataatactgttgatgggtgtctggtcagagacatcaagaaataacgccggaacattagtgcaggcagcttccacagcaatggcatcctggtcatccagcggatagttaatgatcagcccactgacgcgttgcgcgagaagattgtgcaccgccgctttacaggcttcgacgccgcttcgttctaccatcgacaccaccacgctggcacccagttgatcggcgcgagatttaatcgccgcgacaatttgcgacggcgcgtgcagggccagactggaggtggcaacgccaatcagcaacgactgtttgcccgccagttgttgtgccacgcggttgggaatgtaattcagctccgccatcgccgcttccactttttcccgcgttttcgcagaaacgtggctggcctggttcaccacgcgggaaacggtctgataagagacaccggcatactctgcgacatcgtataacgttactggtttcacattcaccaccctgaattgactctcttccgggcgctatcatgccataccgcgaaaggttttgcaccattccatggtgtcggaattgctgcaggtcgagggggtcatggctgcgccccgacacccgccaacacccgctgacgcgccctgacgggcttgtctgctcccggcatccgcttacagacaagctgtgaccgtctccgggagctgcatgtgtcagaggttttcaccgtcatcaccgaaacgcgcgaggcaggatggcgcccaacagtcccccggccacggggcctgccaccatacccacgccgaaacaagcgctcatgagcccgaagtggcgagcccgatcttccccatcggtgatgtcggcgatataggcgccagcaaccgcacctgtggcgccggtgatgccggccacgatgcgtccggcgtagaggatccgtcgacctgcaggggggggggggcgctgaggtctgcctcgtgaagaaggtgttgctgactcataccaggcctgaatcgccccatcatccagccagaaagtgagggagccacggttgatgagagctttgttgtaggtggaccagttggtgattttgaacttttgctttgccacggaacggtctgcgttgtcgggaagatgcgtgatctgatccttcaactcagcaaaagttcgatttattcaacaaagccgccgtcccgtcaagtcagcgtaatgctctgccagtgttacaaccaattaaccaattctgattagaaaaactcatcgagcatcaaatgaaactgcaatttattcatatcaggattatcaataccatatttttgaaaaagccgtttctgtaatgaaggagaaaactcaccgaggcagttccataggatggcaagatcctggtatcggtctgcgattccgactcgtccaacatcaatacaacctattaatttcccctcgtcaaaaataaggttatcaagtgagaaatcaccatgagtgacgactgaatccggtgagaatggcaaaagcttatgcatttctttccagacttgttcaacaggccagccattacgctcgtcatcaaaatcactcgcatcaaccaaaccgttattcattcgtgattgcgcctgagcgagacgaaatacgcgatcgctgttaaaaggacaattacaaacaggaatcgaatgcaaccggcgcaggaacactgccagcgcatcaacaatattttcacctgaatcaggatattcttctaatacctggaatgctgttttcccggggatcgcagtggtgagtaaccatgcatcatcaggagtacggataaaatgcttgatggtcggaagaggcataaattccgtcagccagtttagtctgaccatctcatctgtaacatcattggcaacgctacctttgccatgtttcagaaacaactctggcgcatcgggcttcccatacaatcgatagattgtcgcacctgattgcccgacattatcgcgagcccatttatacccatataaatcagcatccatgttggaatttaatcgcggcctcgagcaagacgtttcccgttgaatatggctcat

SEQ ID NO: 154 - DNA, 5309 bp, Artificial
  Synthetic
aacaccccttgtattactgtttatgtaagcagacagttttattgttcatgatgatatatttttatcttgtgcaatgtaacatcagagattttgagacacaacgtggctttccatcaaaaaaatattgacaacataaaaaactttgtgttatacttgtggaattgtgagcggataacaattctatatctgttattttttccaaccacagatctatgagcaaaggtgaagaactgtttaccggcagcgagctgattaaggagaacatgcacatgaagctgtacatggaaggcaccgtgaacaaccaccacttcaagtgcacatccgagggcgaaggcaagccctacgagggcacccagaccatgagaatcaaggtggtcgagggcggccctctacccttcgccttcgacatcttggctaccagcttcatgtacggcagctacaccttcatcaaccacacccagggcatccccgacttctttaagcagtccttccctgagggcttcacatgggagagagtcaccacatacgaagacgggggcgtgctgaccgctacccaggacaccagcctccaggacggttgcctcatctacaacgtcaagatcagaggggtgaacttcacatccaacggccctgtgatgcagaagaaaacactcggctgggaggccggcaccgagatgctgtaccccgctgacggcggcctggaaggcagatctgacgacgccctgaagctcgtgggcgggggccacctgatctgcaacttgaagagcacatacagatccaagaaacccgctaagaatctcaaggtgcccggcgtctactatgtggaccgaagactggaaagaatcaaggaggccgacaaagagacctacgtcgagcagcacgaggtggctgtggccagatactgcgacctccctagcaaactggggcacaagcttaattaagtcgaccggctgctaacaaagcccgcggccgctgaagatcgatctcgacgagtgagagaagattttcagcctgatacagattaaatcagaacgcagaagcggtctgataaaacagaatttgcctggcggcagtagcgcggtggtcccacctgaccccatgccgaactcagaagtgaaacgccgtagcgccgatggtagtgtggggtcaccccatgcgagagtagggaactgccaggcatcaaataaaacgaaaggctcagtcgaaagactgggcctttcgttttatctgttgtttgtcggtgaacgctctcctgagtaggacaaatccgccgggagcggatttgaacgttgcgaagcaacggcccggagggtggcgggcaggacgcccgccataaactgccaggcatcaaattaagcagaaggccatcctgacggatggcctttttgcgtttctacagagcgtcagaccccttaataagatgatcttcttgagatcgttttggtctgcgcgtaatctcttgctctgaaaacgaaaaaaccgccttgcagggcggtttttcgaaggttctctgagctaccaactctttgaaccgaggtaactggcttggaggagcgcagtcaccaaaacttgtcctttcagtttagccttaaccggcgcatgacttcaagactaactcctctaaatcaattaccagtggctgctgccagtggtgcttttgcatgtctttccgggttggactcaagacgatagttaccggataaggcgcagcggtcggactgaacggggggttcgtgcatacagtccagcttggagcgaactgcctacccggaactgagtgtcaggcgtggaatgagacaaacgcggccataacagcggaatgacaccggtaaaccgaaaggcaggaacaggagagcgcacgagggagccgccagggggaaacgcctggtatctttatagtcctgtcgggtttcgccaccactgatttgagcgtcagatttcgtgatgcttgtcaggggggcggagcctatggaaaaacggctttgccgcggccctctcggatctgtatggtgcactctcagtacaatctgctctgatgccgcatagttaagccagtatacactccgctatcgctacgtgactgcctcgacctgcagcaattccaacgccatcaaaaataattcgcgtctggccttcctgtagccagctttcatcaacattaaatgtgagcgagtaacaacccgtcggattctccgtgggaacaaacggcggattgaccgtaatgggataggtcacgttggtgtagatgggcgcatcgtaaccgtgcatctgccagtttgaggggacgacgacagtatcggcctcaggaagatcgcactccagccagctttccggcaccgcttctggtgccggaaaccaggcaaagcgccattcgccattcaggctgcgcaactgttgggaagggcgatcggtgcgggcctcttcgctattacgccagctggcgaaagggggatgtgctgcaaggcgattaagttgggtaacgccagggttttcccagtcacgacgttgtaaaacgacggccagtgaatccgtaatcatggtcatagctgtttcctgtgtgaaattgttatccgctcacaattccacacaacatacgagccggaagcataaagtgtaaagcctggggtgcctaatgagtgagctaacttacattaattgcgttgcgctcactgcccgctttccagtcgggaaacctgtcgtgccagctgcattaatgaatcggccaacgcgcggggagaggcggtttgcgtattgggcgccagggtggtttttcttttcaccagtgagacgggcaacagctgattgcccttcaccgcctggccctgagagagttgcagcaagcggtccacgctggtttgccccagcaggcgaaaatcctgtttgatggtggttaacggcgggatataacatgagctgtcttcggtatcgtcgtatcccactaccgagatatccgcaccaacgcgcagcccggactcggtaatggcgcgcattgcgcccagcgccatctgatcgttggcaaccagcatcgcagtgggaacgatgccctcattcagcatttgcatggtttgttgaaaaccggacatggcactccagtcgccttcccgttccgctatcggctgaatttgattgcgagtgagatatttatgccagccagccagacgcagacgcgccgagacagaacttaatgggcccgctaacagcgcgatttgctggtgacccaatgcgaccagatgctccacgcccagtcgcgtaccgtcttcatgggagaaaataatactgttgatgggtgtctggtcagagacatcaagaaataacgccggaacattagtgcaggcagcttccacagcaatggcatcctggtcatccagcggatagttaatgatcagcccactgacgcgttgcgcgagaagattgtgcaccgccgctttacaggcttcgacgccgcttcgttctaccatcgacaccaccacgctggcacccagttgatcggcgcgagatttaatcgccgcgacaatttgcgacggcgcgtgcagggccagactggaggtggcaacgccaatcagcaacgactgtttgcccgccagttgttgtgccacgcggttgggaatgtaattcagctccgccatcgccgcttccactttttcccgcgttttcgcagaaacgtggctggcctggttcaccacgcgggaaacggtctgataagagacaccggcatactctgcgacatcgtataacgttactggtttcacattcaccaccctgaattgactctcttccgggcgctatcatgccataccgcgaaaggttttgcaccattccatggtgtcggaattgctgcaggtcgagggggtcatggctgcgccccgacacccgccaacacccgctgacgcgccctgacgggcttgtctgctcccggcatccgcttacagacaagctgtgaccgtctccgggagctgcatgtgtcagaggttttcaccgtcatcaccgaaacgcgcgaggcaggatggcgcccaacagtcccccggccacggggcctgccaccatacccacgccgaaacaagcgctcatgagcccgaagtggcgagcccgatcttccccatcggtgatgtcggcgatataggcgccagcaaccgcacctgtggcgccggtgatgccggccacgatgcgtccggcgtagaggatccgtcgacctgcaggggggggggggcgctgaggtctgcctcgtgaagaaggtgttgctgactcataccaggcctgaatcgccccatcatccagccagaaagtgagggagccacggttgatgagagctttgttgtaggtggaccagttggtgattttgaacttttgctttgccacggaacggtctgcgttgtcgggaagatgcgtgatctgatccttcaactcagcaaaagttcgatttattcaacaaagccgccgtcccgtcaagtcagcgtaatgctctgccagtgttacaaccaattaaccaattctgattagaaaaactcatcgagcatcaaatgaaactgcaatttattcatatcaggattatcaataccatatttttgaaaaagccgtttctgtaatgaaggagaaaactcaccgaggcagttccataggatggcaagatcctggtatcggtctgcgattccgactcgtccaacatcaatacaacctattaatttcccctcgtcaaaaataaggttatcaagtgagaaatcaccatgagtgacgactgaatccggtgagaatggcaaaagcttatgcatttctttccagacttgttcaacaggccagccattacgctcgtcatcaaaatcactcgcatcaaccaaaccgttattcattcgtgattgcgcctgagcgagacgaaatacgcgatcgctgttaaaaggacaattacaaacaggaatcgaatgcaaccggcgcaggaacactgccagcgcatcaacaatattttcacctgaatcaggatattcttctaatacctggaatgctgttttcccggggatcgcagtggtgagtaaccatgcatcatcaggagtacggataaaatgcttgatggtcggaagaggcataaattccgtcagccagtttagtctgaccatctcatctgtaacatcattggcaacgctacctttgccatgtttcagaaacaactctggcgcatcgggcttcccatacaatcgatagattgtcgcacctgattgcccgacattatcgcgagcccatttatacccatataaatcagcatccatgttggaatttaatcgcggcctcgagcaagacgtttcccgttgaatatggctcat

SEQ ID NO: 155 - DNA, 5279 bp, Artificial
  Synthetic
aacaccccttgtattactgtttatgtaagcagacagttttattgttcatgatgatatatttttatcttgtgcaatgtaacatcagagattttgagacacaacgtggctttccatcaaaaaaatattgacaacataaaaaactttgtgttatacttgtggaattgtgagcggataacaattctatatctgttattttttccaaccacagatctatggtgtcttattcaaagcaaggcatcgcacaagaaatgcggacgaaataccgtatggaaggcagtgtcaatggccatgagttcacgatcgaaggtgtaggaactggaaacccttacgaagggaaacagatgtccgaattagtgatcatcaagcctaagggaaaaccccttccattctcctttgacatactgtcaacagcctttcaatatggaaacagatgcttcacaaagtaccctgccgacatgcctgactatttcaagcaagcattcccagatggaatgtcatatgaaaggtcatttctatttgaggatggaggagttgctacagccagctggagcattcgtctcgaaggaaattgcttcatccacaattccatctatcatggcgtaaactttcccgctgatggacccgtaatgaagaagcagacaattggctgggataagtccttcgaaaaaatgagtgtggctaaagaggtgctaagaggtgatgtgactcagtttcttctgctcgaaggaggtggttaccagagatgccggtttcactccacttacaaaacggagaagccagtcgcaatgcccccgagtcatgtcgtagaacatcaaattgtgaggaccgaccttggccaaactgcaaaaggcttcaaggtcaagctggaagaacatgctgaggctcatgttaaccctttgaaggttaaataagtcgaccggctgctaacaaagcccgcggccgctgaagatcgatctcgacgagtgagagaagattttcagcctgatacagattaaatcagaacgcagaagcggtctgataaaacagaatttgcctggcggcagtagcgcggtggtcccacctgaccccatgccgaactcagaagtgaaacgccgtagcgccgatggtagtgtggggtcaccccatgcgagagtagggaactgccaggcatcaaataaaacgaaaggctcagtcgaaagactgggcctttcgttttatctgttgtttgtcggtgaacgctctcctgagtaggacaaatccgccgggagcggatttgaacgttgcgaagcaacggcccggagggtggcgggcaggacgcccgccataaactgccaggcatcaaattaagcagaaggccatcctgacggatggcctttttgcgtttctacagagcgtcagaccccttaataagatgatcttcttgagatcgttttggtctgcgcgtaatctcttgctctgaaaacgaaaaaaccgccttgcagggcggtttttcgaaggttctctgagctaccaactctttgaaccgaggtaactggcttggaggagcgcagtcaccaaaacttgtcctttcagtttagccttaaccggcgcatgacttcaagactaactcctctaaatcaattaccagtggctgctgccagtggtgcttttgcatgtctttccgggttggactcaagacgatagttaccggataaggcgcagcggtcggactgaacggggggttcgtgcatacagtccagcttggagcgaactgcctacccggaactgagtgtcaggcgtggaatgagacaaacgcggccataacagcggaatgacaccggtaaaccgaaaggcaggaacaggagagcgcacgagggagccgccagggggaaacgcctggtatctttatagtcctgtcgggtttcgccaccactgatttgagcgtcagatttcgtgatgcttgtcaggggggcggagcctatggaaaaacggctttgccgcggccctctcggatctgtatggtgcactctcagtacaatctgctctgatgccgcatagttaagccagtatacactccgctatcgctacgtgactgcctcgacctgcagcaattccaacgccatcaaaaataattcgcgtctggccttcctgtagccagctttcatcaacattaaatgtgagcgagtaacaacccgtcggattctccgtgggaacaaacggcggattgaccgtaatgggataggtcacgttggtgtagatgggcgcatcgtaaccgtgcatctgccagtttgaggggacgacgacagtatcggcctcaggaagatcgcactccagccagctttccggcaccgcttctggtgccggaaaccaggcaaagcgccattcgccattcaggctgcgcaactgttgggaagggcgatcggtgcgggcctcttcgctattacgccagctggcgaaagggggatgtgctgcaaggcgattaagttgggtaacgccagggttttcccagtcacgacgttgtaaaacgacggccagtgaatccgtaatcatggtcatagctgtttcctgtgtgaaattgttatccgctcacaattccacacaacatacgagccggaagcataaagtgtaaagcctggggtgcctaatgagtgagctaacttacattaattgcgttgcgctcactgcccgctttccagtcgggaaacctgtcgtgccagctgcattaatgaatcggccaacgcgcggggagaggcggtttgcgtattgggcgccagggtggtttttcttttcaccagtgagacgggcaacagctgattgcccttcaccgcctggccctgagagagttgcagcaagcggtccacgctggtttgccccagcaggcgaaaatcctgtttgatggtggttaacggcgggatataacatgagctgtcttcggtatcgtcgtatcccactaccgagatatccgcaccaacgcgcagcccggactcggtaatggcgcgcattgcgcccagcgccatctgatcgttggcaaccagcatcgcagtgggaacgatgccctcattcagcatttgcatggtttgttgaaaaccggacatggcactccagtcgccttcccgttccgctatcggctgaatttgattgcgagtgagatatttatgccagccagccagacgcagacgcgccgagacagaacttaatgggcccgctaacagcgcgatttgctggtgacccaatgcgaccagatgctccacgcccagtcgcgtaccgtcttcatgggagaaaataatactgttgatgggtgtctggtcagagacatcaagaaataacgccggaacattagtgcaggcagcttccacagcaatggcatcctggtcatccagcggatagttaatgatcagcccactgacgcgttgcgcgagaagattgtgcaccgccgctttacaggcttcgacgccgcttcgttctaccatcgacaccaccacgctggcacccagttgatcggcgcgagatttaatcgccgcgacaatttgcgacggcgcgtgcagggccagactggaggtggcaacgccaatcagcaacgactgtttgcccgccagttgttgtgccacgcggttgggaatgtaattcagctccgccatcgccgcttccactttttcccgcgttttcgcagaaacgtggctggcctggttcaccacgcgggaaacggtctgataagagacaccggcatactctgcgacatcgtataacgttactggtttcacattcaccaccctgaattgactctcttccgggcgctatcatgccataccgcgaaaggttttgcaccattccatggtgtcggaattgctgcaggtcgagggggtcatggctgcgccccgacacccgccaacacccgctgacgcgccctgacgggcttgtctgctcccggcatccgcttacagacaagctgtgaccgtctccgggagctgcatgtgtcagaggttttcaccgtcatcaccgaaacgcgcgaggcaggatggcgcccaacagtcccccggccacggggcctgccaccatacccacgccgaaacaagcgctcatgagcccgaagtggcgagcccgatcttccccatcggtgatgtcggcgatataggcgccagcaaccgcacctgtggcgccggtgatgccggccacgatgcgtccggcgtagaggatccgtcgacctgcaggggggggggggcgctgaggtctgcctcgtgaagaaggtgttgctgactcataccaggcctgaatcgccccatcatccagccagaaagtgagggagccacggttgatgagagctttgttgtaggtggaccagttggtgattttgaacttttgctttgccacggaacggtctgcgttgtcgggaagatgcgtgatctgatccttcaactcagcaaaagttcgatttattcaacaaagccgccgtcccgtcaagtcagcgtaatgctctgccagtgttacaaccaattaaccaattctgattagaaaaactcatcgagcatcaaatgaaactgcaatttattcatatcaggattatcaataccatatttttgaaaaagccgtttctgtaatgaaggagaaaactcaccgaggcagttccataggatggcaagatcctggtatcggtctgcgattccgactcgtccaacatcaatacaacctattaatttcccctcgtcaaaaataaggttatcaagtgagaaatcaccatgagtgacgactgaatccggtgagaatggcaaaagcttatgcatttctttccagacttgttcaacaggccagccattacgctcgtcatcaaaatcactcgcatcaaccaaaccgttattcattcgtgattgcgcctgagcgagacgaaatacgcgatcgctgttaaaaggacaattacaaacaggaatcgaatgcaaccggcgcaggaacactgccagcgcatcaacaatattttcacctgaatcaggatattcttctaatacctggaatgctgttttcccggggatcgcagtggtgagtaaccatgcatcatcaggagtacggataaaatgcttgatggtcggaagaggcataaattccgtcagccagtttagtctgaccatctcatctgtaacatcattggcaacgctacctttgccatgtttcagaaacaactctggcgcatcgggcttcccatacaatcgatagattgtcgcacctgattgcccgacattatcgcgagcccatttatacccatataaatcagcatccatgttggaatttaatcgcggcctcgagcaagacgtttcccgttgaatatggctcat

SEQ ID NO: 156 - DNA, 5306 bp, Artificial
  Synthetic
aacaccccttgtattactgtttatgtaagcagacagttttattgttcatgatgatatatttttatcttgtgcaatgtaacatcagagattttgagacacaacgtggctttccatcaaaaaaatattgacaacataaaaaactttgtgttatacttgtggaattgtgagcggataacaattctatatctgttattttttccaaccacagatctatgagcaaaggtgaagaactgtttaccggcgtgtcttattcaaagcaaggcatcgcacaagaaatgcggacgaaataccgtatggaaggcagtgtcaatggccatgagttcacgatcgaaggtgtaggaactggaaacccttacgaagggaaacagatgtccgaattagtgatcatcaagcctaagggaaaaccccttccattctcctttgacatactgtcaacagcctttcaatatggaaacagatgcttcacaaagtaccctgccgacatgcctgactatttcaagcaagcattcccagatggaatgtcatatgaaaggtcatttctatttgaggatggaggagttgctacagccagctggagcattcgtctcgaaggaaattgcttcatccacaattccatctatcatggcgtaaactttcccgctgatggacccgtaatgaagaagcagacaattggctgggataagtccttcgaaaaaatgagtgtggctaaagaggtgctaagaggtgatgtgactcagtttcttctgctcgaaggaggtggttaccagagatgccggtttcactccacttacaaaacggagaagccagtcgcaatgcccccgagtcatgtcgtagaacatcaaattgtgaggaccgaccttggccaaactgcaaaaggcttcaaggtcaagctggaagaacatgctgaggctcatgttaaccctttgaaggttaaataagtcgaccggctgctaacaaagcccgcggccgctgaagatcgatctcgacgagtgagagaagattttcagcctgatacagattaaatcagaacgcagaagcggtctgataaaacagaatttgcctggcggcagtagcgcggtggtcccacctgaccccatgccgaactcagaagtgaaacgccgtagcgccgatggtagtgtggggtcaccccatgcgagagtagggaactgccaggcatcaaataaaacgaaaggctcagtcgaaagactgggcctttcgttttatctgttgtttgtcggtgaacgctctcctgagtaggacaaatccgccgggagcggatttgaacgttgcgaagcaacggcccggagggtggcgggcaggacgcccgccataaactgccaggcatcaaattaagcagaaggccatcctgacggatggcctttttgcgtttctacagagcgtcagaccccttaataagatgatcttcttgagatcgttttggtctgcgcgtaatctcttgctctgaaaacgaaaaaaccgccttgcagggcggtttttcgaaggttctctgagctaccaactctttgaaccgaggtaactggcttggaggagcgcagtcaccaaaacttgtcctttcagtttagccttaaccggcgcatgacttcaagactaactcctctaaatcaattaccagtggctgctgccagtggtgcttttgcatgtctttccgggttggactcaagacgatagttaccggataaggcgcagcggtcggactgaacggggggttcgtgcatacagtccagcttggagcgaactgcctacccggaactgagtgtcaggcgtggaatgagacaaacgcggccataacagcggaatgacaccggtaaaccgaaaggcaggaacaggagagcgcacgagggagccgccagggggaaacgcctggtatctttatagtcctgtcgggtttcgccaccactgatttgagcgtcagatttcgtgatgcttgtcaggggggcggagcctatggaaaaacggctttgccgcggccctctcggatctgtatggtgcactctcagtacaatctgctctgatgccgcatagttaagccagtatacactccgctatcgctacgtgactgcctcgacctgcagcaattccaacgccatcaaaaataattcgcgtctggccttcctgtagccagctttcatcaacattaaatgtgagcgagtaacaacccgtcggattctccgtgggaacaaacggcggattgaccgtaatgggataggtcacgttggtgtagatgggcgcatcgtaaccgtgcatctgccagtttgaggggacgacgacagtatcggcctcaggaagatcgcactccagccagctttccggcaccgcttctggtgccggaaaccaggcaaagcgccattcgccattcaggctgcgcaactgttgggaagggcgatcggtgcgggcctcttcgctattacgccagctggcgaaagggggatgtgctgcaaggcgattaagttgggtaacgccagggttttcccagtcacgacgttgtaaaacgacggccagtgaatccgtaatcatggtcatagctgtttcctgtgtgaaattgttatccgctcacaattccacacaacatacgagccggaagcataaagtgtaaagcctggggtgcctaatgagtgagctaacttacattaattgcgttgcgctcactgcccgctttccagtcgggaaacctgtcgtgccagctgcattaatgaatcggccaacgcgcggggagaggcggtttgcgtattgggcgccagggtggtttttcttttcaccagtgagacgggcaacagctgattgcccttcaccgcctggccctgagagagttgcagcaagcggtccacgctggtttgccccagcaggcgaaaatcctgtttgatggtggttaacggcgggatataacatgagctgtcttcggtatcgtcgtatcccactaccgagatatccgcaccaacgcgcagcccggactcggtaatggcgcgcattgcgcccagcgccatctgatcgttggcaaccagcatcgcagtgggaacgatgccctcattcagcatttgcatggtttgttgaaaaccggacatggcactccagtcgccttcccgttccgctatcggctgaatttgattgcgagtgagatatttatgccagccagccagacgcagacgcgccgagacagaacttaatgggcccgctaacagcgcgatttgctggtgacccaatgcgaccagatgctccacgcccagtcgcgtaccgtcttcatgggagaaaataatactgttgatgggtgtctggtcagagacatcaagaaataacgccggaacattagtgcaggcagcttccacagcaatggcatcctggtcatccagcggatagttaatgatcagcccactgacgcgttgcgcgagaagattgtgcaccgccgctttacaggcttcgacgccgcttcgttctaccatcgacaccaccacgctggcacccagttgatcggcgcgagatttaatcgccgcgacaatttgcgacggcgcgtgcagggccagactggaggtggcaacgccaatcagcaacgactgtttgcccgccagttgttgtgccacgcggttgggaatgtaattcagctccgccatcgccgcttccactttttcccgcgttttcgcagaaacgtggctggcctggttcaccacgcgggaaacggtctgataagagacaccggcatactctgcgacatcgtataacgttactggtttcacattcaccaccctgaattgactctcttccgggcgctatcatgccataccgcgaaaggttttgcaccattccatggtgtcggaattgctgcaggtcgagggggtcatggctgcgccccgacacccgccaacacccgctgacgcgccctgacgggcttgtctgctcccggcatccgcttacagacaagctgtgaccgtctccgggagctgcatgtgtcagaggttttcaccgtcatcaccgaaacgcgcgaggcaggatggcgcccaacagtcccccggccacggggcctgccaccatacccacgccgaaacaagcgctcatgagcccgaagtggcgagcccgatcttccccatcggtgatgtcggcgatataggcgccagcaaccgcacctgtggcgccggtgatgccggccacgatgcgtccggcgtagaggatccgtcgacctgcaggggggggggggcgctgaggtctgcctcgtgaagaaggtgttgctgactcataccaggcctgaatcgccccatcatccagccagaaagtgagggagccacggttgatgagagctttgttgtaggtggaccagttggtgattttgaacttttgctttgccacggaacggtctgcgttgtcgggaagatgcgtgatctgatccttcaactcagcaaaagttcgatttattcaacaaagccgccgtcccgtcaagtcagcgtaatgctctgccagtgttacaaccaattaaccaattctgattagaaaaactcatcgagcatcaaatgaaactgcaatttattcatatcaggattatcaataccatatttttgaaaaagccgtttctgtaatgaaggagaaaactcaccgaggcagttccataggatggcaagatcctggtatcggtctgcgattccgactcgtccaacatcaatacaacctattaatttcccctcgtcaaaaataaggttatcaagtgagaaatcaccatgagtgacgactgaatccggtgagaatggcaaaagcttatgcatttctttccagacttgttcaacaggccagccattacgctcgtcatcaaaatcactcgcatcaaccaaaccgttattcattcgtgattgcgcctgagcgagacgaaatacgcgatcgctgttaaaaggacaattacaaacaggaatcgaatgcaaccggcgcaggaacactgccagcgcatcaacaatattttcacctgaatcaggatattcttctaatacctggaatgctgttttcccggggatcgcagtggtgagtaaccatgcatcatcaggagtacggataaaatgcttgatggtcggaagaggcataaattccgtcagccagtttagtctgaccatctcatctgtaacatcattggcaacgctacctttgccatgtttcagaaacaactctggcgcatcgggcttcccatacaatcgatagattgtcgcacctgattgcccgacattatcgcgagcccatttatacccatataaatcagcatccatgttggaatttaatcgcggcctcgagcaagacgtttcccgttgaatatggctcat

SEQ ID NO: 157 - DNA, 5258 bp, Artificial
  Synthetic
aacaccccttgtattactgtttatgtaagcagacagttttattgttcatgatgatatatttttatcttgtgcaatgtaacatcagagattttgagacacaacgtggctttccatcaaaaaaatattgacaacataaaaaactttgtgttatacttgtggaattgtgagcggataacaattctatatctgttattttttccaaccacagatctatggacagcaccgagaatgtgattaaaccgttcatgcgcttcaaagttcacatggagggttcggttaacggtcacgagttcgagatcgaaggcgtaggcgagggcaagccgtatgaaggcactcaaaccgcgaaactgcaagtgactaaaggcggcccgctgccttttgcgtgggacatcctgagcccgcaatttttctacggttctaaagcatatatcaaacacccagcggatatcccggactatttaaagcagtcttttccggaaggtttcaagtgggaacgcgtaatgaattttgaagatggtggtgtcgtgaccgtcactcaggactcctccctgcaggatggcaccttgatctatcacgttaaatttattggtgtgaattttccatctgatggcccggtgatgcagaaaaagacgttgggttgggagccgtctaccgaacgcaactatccgcgcgatggtgtgctgaaaggcgaaaatcatatggcgctgaaactgaaaggtggcggccattatctgtgtgaatttaaaagcatttacatggccaagaaacctgtgaagctgcctggctatcactatgtggattacaaactggacatcacctctcataatgaagattatacggtcgtagagcaatatgagcgcgccgaggctcgtcatcatctgtttcagtaagtcgaccggctgctaacaaagcccgcggccgctgaagatcgatctcgacgagtgagagaagattttcagcctgatacagattaaatcagaacgcagaagcggtctgataaaacagaatttgcctggcggcagtagcgcggtggtcccacctgaccccatgccgaactcagaagtgaaacgccgtagcgccgatggtagtgtggggtcaccccatgcgagagtagggaactgccaggcatcaaataaaacgaaaggctcagtcgaaagactgggcctttcgttttatctgttgtttgtcggtgaacgctctcctgagtaggacaaatccgccgggagcggatttgaacgttgcgaagcaacggcccggagggtggcgggcaggacgcccgccataaactgccaggcatcaaattaagcagaaggccatcctgacggatggcctttttgcgtttctacagagcgtcagaccccttaataagatgatcttcttgagatcgttttggtctgcgcgtaatctcttgctctgaaaacgaaaaaaccgccttgcagggcggtttttcgaaggttctctgagctaccaactctttgaaccgaggtaactggcttggaggagcgcagtcaccaaaacttgtcctttcagtttagccttaaccggcgcatgacttcaagactaactcctctaaatcaattaccagtggctgctgccagtggtgcttttgcatgtctttccgggttggactcaagacgatagttaccggataaggcgcagcggtcggactgaacggggggttcgtgcatacagtccagcttggagcgaactgcctacccggaactgagtgtcaggcgtggaatgagacaaacgcggccataacagcggaatgacaccggtaaaccgaaaggcaggaacaggagagcgcacgagggagccgccagggggaaacgcctggtatctttatagtcctgtcgggtttcgccaccactgatttgagcgtcagatttcgtgatgcttgtcaggggggcggagcctatggaaaaacggctttgccgcggccctctcggatctgtatggtgcactctcagtacaatctgctctgatgccgcatagttaagccagtatacactccgctatcgctacgtgactgcctcgacctgcagcaattccaacgccatcaaaaataattcgcgtctggccttcctgtagccagctttcatcaacattaaatgtgagcgagtaacaacccgtcggattctccgtgggaacaaacggcggattgaccgtaatgggataggtcacgttggtgtagatgggcgcatcgtaaccgtgcatctgccagtttgaggggacgacgacagtatcggcctcaggaagatcgcactccagccagctttccggcaccgcttctggtgccggaaaccaggcaaagcgccattcgccattcaggctgcgcaactgttgggaagggcgatcggtgcgggcctcttcgctattacgccagctggcgaaagggggatgtgctgcaaggcgattaagttgggtaacgccagggttttcccagtcacgacgttgtaaaacgacggccagtgaatccgtaatcatggtcatagctgtttcctgtgtgaaattgttatccgctcacaattccacacaacatacgagccggaagcataaagtgtaaagcctggggtgcctaatgagtgagctaacttacattaattgcgttgcgctcactgcccgctttccagtcgggaaacctgtcgtgccagctgcattaatgaatcggccaacgcgcggggagaggcggtttgcgtattgggcgccagggtggtttttcttttcaccagtgagacgggcaacagctgattgcccttcaccgcctggccctgagagagttgcagcaagcggtccacgctggtttgccccagcaggcgaaaatcctgtttgatggtggttaacggcgggatataacatgagctgtcttcggtatcgtcgtatcccactaccgagatatccgcaccaacgcgcagcccggactcggtaatggcgcgcattgcgcccagcgccatctgatcgttggcaaccagcatcgcagtgggaacgatgccctcattcagcatttgcatggtttgttgaaaaccggacatggcactccagtcgccttcccgttccgctatcggctgaatttgattgcgagtgagatatttatgccagccagccagacgcagacgcgccgagacagaacttaatgggcccgctaacagcgcgatttgctggtgacccaatgcgaccagatgctccacgcccagtcgcgtaccgtcttcatgggagaaaataatactgttgatgggtgtctggtcagagacatcaagaaataacgccggaacattagtgcaggcagcttccacagcaatggcatcctggtcatccagcggatagttaatgatcagcccactgacgcgttgcgcgagaagattgtgcaccgccgctttacaggcttcgacgccgcttcgttctaccatcgacaccaccacgctggcacccagttgatcggcgcgagatttaatcgccgcgacaatttgcgacggcgcgtgcagggccagactggaggtggcaacgccaatcagcaacgactgtttgcccgccagttgttgtgccacgcggttgggaatgtaattcagctccgccatcgccgcttccactttttcccgcgttttcgcagaaacgtggctggcctggttcaccacgcgggaaacggtctgataagagacaccggcatactctgcgacatcgtataacgttactggtttcacattcaccaccctgaattgactctcttccgggcgctatcatgccataccgcgaaaggttttgcaccattccatggtgtcggaattgctgcaggtcgagggggtcatggctgcgccccgacacccgccaacacccgctgacgcgccctgacgggcttgtctgctcccggcatccgcttacagacaagctgtgaccgtctccgggagctgcatgtgtcagaggttttcaccgtcatcaccgaaacgcgcgaggcaggatggcgcccaacagtcccccggccacggggcctgccaccatacccacgccgaaacaagcgctcatgagcccgaagtggcgagcccgatcttccccatcggtgatgtcggcgatataggcgccagcaaccgcacctgtggcgccggtgatgccggccacgatgcgtccggcgtagaggatccgtcgacctgcaggggggggggggcgctgaggtctgcctcgtgaagaaggtgttgctgactcataccaggcctgaatcgccccatcatccagccagaaagtgagggagccacggttgatgagagctttgttgtaggtggaccagttggtgattttgaacttttgctttgccacggaacggtctgcgttgtcgggaagatgcgtgatctgatccttcaactcagcaaaagttcgatttattcaacaaagccgccgtcccgtcaagtcagcgtaatgctctgccagtgttacaaccaattaaccaattctgattagaaaaactcatcgagcatcaaatgaaactgcaatttattcatatcaggattatcaataccatatttttgaaaaagccgtttctgtaatgaaggagaaaactcaccgaggcagttccataggatggcaagatcctggtatcggtctgcgattccgactcgtccaacatcaatacaacctattaatttcccctcgtcaaaaataaggttatcaagtgagaaatcaccatgagtgacgactgaatccggtgagaatggcaaaagcttatgcatttctttccagacttgttcaacaggccagccattacgctcgtcatcaaaatcactcgcatcaaccaaaccgttattcattcgtgattgcgcctgagcgagacgaaatacgcgatcgctgttaaaaggacaattacaaacaggaatcgaatgcaaccggcgcaggaacactgccagcgcatcaacaatattttcacctgaatcaggatattcttctaatacctggaatgctgttttcccggggatcgcagtggtgagtaaccatgcatcatcaggagtacggataaaatgcttgatggtcggaagaggcataaattccgtcagccagtttagtctgaccatctcatctgtaacatcattggcaacgctacctttgccatgtttcagaaacaactctggcgcatcgggcttcccatacaatcgatagattgtcgcacctgattgcccgacattatcgcgagcccatttatacccatataaatcagcatccatgttggaatttaatcgcggcctcgagcaagacgtttcccgttgaatatggctcat

SEQ ID NO: 158 - DNA, 5285 bp, Artificial
  Synthetic
aacaccccttgtattactgtttatgtaagcagacagttttattgttcatgatgatatatttttatcttgtgcaatgtaacatcagagattttgagacacaacgtggctttccatcaaaaaaatattgacaacataaaaaactttgtgttatacttgtggaattgtgagcggataacaattctatatctgttattttttccaaccacagatctatgagcaaaggtgaagaactgtttaccggcgacagcaccgagaatgtgattaaaccgttcatgcgcttcaaagttcacatggagggttcggttaacggtcacgagttcgagatcgaaggcgtaggcgagggcaagccgtatgaaggcactcaaaccgcgaaactgcaagtgactaaaggcggcccgctgccttttgcgtgggacatcctgagcccgcaatttttctacggttctaaagcatatatcaaacacccagcggatatcccggactatttaaagcagtcttttccggaaggtttcaagtgggaacgcgtaatgaattttgaagatggtggtgtcgtgaccgtcactcaggactcctccctgcaggatggcaccttgatctatcacgttaaatttattggtgtgaattttccatctgatggcccggtgatgcagaaaaagacgttgggttgggagccgtctaccgaacgcaactatccgcgcgatggtgtgctgaaaggcgaaaatcatatggcgctgaaactgaaaggtggcggccattatctgtgtgaatttaaaagcatttacatggccaagaaacctgtgaagctgcctggctatcactatgtggattacaaactggacatcacctctcataatgaagattatacggtcgtagagcaatatgagcgcgccgaggctcgtcatcatctgtttcagtaagtcgaccggctgctaacaaagcccgcggccgctgaagatcgatctcgacgagtgagagaagattttcagcctgatacagattaaatcagaacgcagaagcggtctgataaaacagaatttgcctggcggcagtagcgcggtggtcccacctgaccccatgccgaactcagaagtgaaacgccgtagcgccgatggtagtgtggggtcaccccatgcgagagtagggaactgccaggcatcaaataaaacgaaaggctcagtcgaaagactgggcctttcgttttatctgttgtttgtcggtgaacgctctcctgagtaggacaaatccgccgggagcggatttgaacgttgcgaagcaacggcccggagggtggcgggcaggacgcccgccataaactgccaggcatcaaattaagcagaaggccatcctgacggatggcctttttgcgtttctacagagcgtcagaccccttaataagatgatcttcttgagatcgttttggtctgcgcgtaatctcttgctctgaaaacgaaaaaaccgccttgcagggcggtttttcgaaggttctctgagctaccaactctttgaaccgaggtaactggcttggaggagcgcagtcaccaaaacttgtcctttcagtttagccttaaccggcgcatgacttcaagactaactcctctaaatcaattaccagtggctgctgccagtggtgcttttgcatgtctttccgggttggactcaagacgatagttaccggataaggcgcagcggtcggactgaacggggggttcgtgcatacagtccagcttggagcgaactgcctacccggaactgagtgtcaggcgtggaatgagacaaacgcggccataacagcggaatgacaccggtaaaccgaaaggcaggaacaggagagcgcacgagggagccgccagggggaaacgcctggtatctttatagtcctgtcgggtttcgccaccactgatttgagcgtcagatttcgtgatgcttgtcaggggggcggagcctatggaaaaacggctttgccgcggccctctcggatctgtatggtgcactctcagtacaatctgctctgatgccgcatagttaagccagtatacactccgctatcgctacgtgactgcctcgacctgcagcaattccaacgccatcaaaaataattcgcgtctggccttcctgtagccagctttcatcaacattaaatgtgagcgagtaacaacccgtcggattctccgtgggaacaaacggcggattgaccgtaatgggataggtcacgttggtgtagatgggcgcatcgtaaccgtgcatctgccagtttgaggggacgacgacagtatcggcctcaggaagatcgcactccagccagctttccggcaccgcttctggtgccggaaaccaggcaaagcgccattcgccattcaggctgcgcaactgttgggaagggcgatcggtgcgggcctcttcgctattacgccagctggcgaaagggggatgtgctgcaaggcgattaagttgggtaacgccagggttttcccagtcacgacgttgtaaaacgacggccagtgaatccgtaatcatggtcatagctgtttcctgtgtgaaattgttatccgctcacaattccacacaacatacgagccggaagcataaagtgtaaagcctggggtgcctaatgagtgagctaacttacattaattgcgttgcgctcactgcccgctttccagtcgggaaacctgtcgtgccagctgcattaatgaatcggccaacgcgcggggagaggcggtttgcgtattgggcgccagggtggtttttcttttcaccagtgagacgggcaacagctgattgcccttcaccgcctggccctgagagagttgcagcaagcggtccacgctggtttgccccagcaggcgaaaatcctgtttgatggtggttaacggcgggatataacatgagctgtcttcggtatcgtcgtatcccactaccgagatatccgcaccaacgcgcagcccggactcggtaatggcgcgcattgcgcccagcgccatctgatcgttggcaaccagcatcgcagtgggaacgatgccctcattcagcatttgcatggtttgttgaaaaccggacatggcactccagtcgccttcccgttccgctatcggctgaatttgattgcgagtgagatatttatgccagccagccagacgcagacgcgccgagacagaacttaatgggcccgctaacagcgcgatttgctggtgacccaatgcgaccagatgctccacgcccagtcgcgtaccgtcttcatgggagaaaataatactgttgatgggtgtctggtcagagacatcaagaaataacgccggaacattagtgcaggcagcttccacagcaatggcatcctggtcatccagcggatagttaatgatcagcccactgacgcgttgcgcgagaagattgtgcaccgccgctttacaggcttcgacgccgcttcgttctaccatcgacaccaccacgctggcacccagttgatcggcgcgagatttaatcgccgcgacaatttgcgacggcgcgtgcagggccagactggaggtggcaacgccaatcagcaacgactgtttgcccgccagttgttgtgccacgcggttgggaatgtaattcagctccgccatcgccgcttccactttttcccgcgttttcgcagaaacgtggctggcctggttcaccacgcgggaaacggtctgataagagacaccggcatactctgcgacatcgtataacgttactggtttcacattcaccaccctgaattgactctcttccgggcgctatcatgccataccgcgaaaggttttgcaccattccatggtgtcggaattgctgcaggtcgagggggtcatggctgcgccccgacacccgccaacacccgctgacgcgccctgacgggcttgtctgctcccggcatccgcttacagacaagctgtgaccgtctccgggagctgcatgtgtcagaggttttcaccgtcatcaccgaaacgcgcgaggcaggatggcgcccaacagtcccccggccacggggcctgccaccatacccacgccgaaacaagcgctcatgagcccgaagtggcgagcccgatcttccccatcggtgatgtcggcgatataggcgccagcaaccgcacctgtggcgccggtgatgccggccacgatgcgtccggcgtagaggatccgtcgacctgcaggggggggggggcgctgaggtctgcctcgtgaagaaggtgttgctgactcataccaggcctgaatcgccccatcatccagccagaaagtgagggagccacggttgatgagagctttgttgtaggtggaccagttggtgattttgaacttttgctttgccacggaacggtctgcgttgtcgggaagatgcgtgatctgatccttcaactcagcaaaagttcgatttattcaacaaagccgccgtcccgtcaagtcagcgtaatgctctgccagtgttacaaccaattaaccaattctgattagaaaaactcatcgagcatcaaatgaaactgcaatttattcatatcaggattatcaataccatatttttgaaaaagccgtttctgtaatgaaggagaaaactcaccgaggcagttccataggatggcaagatcctggtatcggtctgcgattccgactcgtccaacatcaatacaacctattaatttcccctcgtcaaaaataaggttatcaagtgagaaatcaccatgagtgacgactgaatccggtgagaatggcaaaagcttatgcatttctttccagacttgttcaacaggccagccattacgctcgtcatcaaaatcactcgcatcaaccaaaccgttattcattcgtgattgcgcctgagcgagacgaaatacgcgatcgctgttaaaaggacaattacaaacaggaatcgaatgcaaccggcgcaggaacactgccagcgcatcaacaatattttcacctgaatcaggatattcttctaatacctggaatgctgttttcccggggatcgcagtggtgagtaaccatgcatcatcaggagtacggataaaatgcttgatggtcggaagaggcataaattccgtcagccagtttagtctgaccatctcatctgtaacatcattggcaacgctacctttgccatgtttcagaaacaactctggcgcatcgggcttcccatacaatcgatagattgtcgcacctgattgcccgacattatcgcgagcccatttatacccatataaatcagcatccatgttggaatttaatcgcggcctcgagcaagacgtttcccgttgaatatggctcat

SEQ ID NO: 159 - DNA, 5315 bp, Artificial
  Synthetic
aacaccccttgtattactgtttatgtaagcagacagttttattgttcatgatgatatatttttatcttgtgcaatgtaacatcagagattttgagacacaacgtggctttccatcaaaaaaatattgacaacataaaaaactttgtgttatacttgtggaattgtgagcggataacaattctatatctgttattttttccaaccacagatctatggtgagcaagggcgaggagctgatcaaggagaacatgcacaccaagctgtacctgacaggcaccgtgaacaaccactacttcgaatgcaccgccgaaggggagggcaagccctacgagggcacccagaccaacaggatcaaggtggtgcgcggaggccccctgccgttcgcattcgacatcctggccccctgctttatgtacgggagcaagaccttcattaaccatccacctgacattcccgattattttaagcagtccttccctgagggcttcacatgggagagaaccaccgtttacgaagacgggggcacactcactgctacacaggacaccagcctccaggacggctgcctgatctacaacgtccaagtcagaggggagaacttcccatccaacggccctgtgatgcagaagaaaacactcggctgggaggccagtaccgagaccctgtaccccgctgacggcagcctggaaggcagactggactgggccctgaagctcgtgggcgggggccacctgcactgcagactggaaaccacatacagatccaagaaacccgcaaagaacctcaagatgcccggcgtctattttattgacaggagactggaaagaatcaaggaggccgacaatgagacctacgtcgagcagcacgaggtggctgtggccagatactgcgacctccctagcaaactggggcacaaacttaatggcatggacgagctgtacaagtaagtcgaccggctgctaacaaagcccgcggccgctgaagatcgatctcgacgagtgagagaagattttcagcctgatacagattaaatcagaacgcagaagcggtctgataaaacagaatttgcctggcggcagtagcgcggtggtcccacctgaccccatgccgaactcagaagtgaaacgccgtagcgccgatggtagtgtggggtcaccccatgcgagagtagggaactgccaggcatcaaataaaacgaaaggctcagtcgaaagactgggcctttcgttttatctgttgtttgtcggtgaacgctctcctgagtaggacaaatccgccgggagcggatttgaacgttgcgaagcaacggcccggagggtggcgggcaggacgcccgccataaactgccaggcatcaaattaagcagaaggccatcctgacggatggcctttttgcgtttctacagagcgtcagaccccttaataagatgatcttcttgagatcgttttggtctgcgcgtaatctcttgctctgaaaacgaaaaaaccgccttgcagggcggtttttcgaaggttctctgagctaccaactctttgaaccgaggtaactggcttggaggagcgcagtcaccaaaacttgtcctttcagtttagccttaaccggcgcatgacttcaagactaactcctctaaatcaattaccagtggctgctgccagtggtgcttttgcatgtctttccgggttggactcaagacgatagttaccggataaggcgcagcggtcggactgaacggggggttcgtgcatacagtccagcttggagcgaactgcctacccggaactgagtgtcaggcgtggaatgagacaaacgcggccataacagcggaatgacaccggtaaaccgaaaggcaggaacaggagagcgcacgagggagccgccagggggaaacgcctggtatctttatagtcctgtcgggtttcgccaccactgatttgagcgtcagatttcgtgatgcttgtcaggggggcggagcctatggaaaaacggctttgccgcggccctctcggatctgtatggtgcactctcagtacaatctgctctgatgccgcatagttaagccagtatacactccgctatcgctacgtgactgcctcgacctgcagcaattccaacgccatcaaaaataattcgcgtctggccttcctgtagccagctttcatcaacattaaatgtgagcgagtaacaacccgtcggattctccgtgggaacaaacggcggattgaccgtaatgggataggtcacgttggtgtagatgggcgcatcgtaaccgtgcatctgccagtttgaggggacgacgacagtatcggcctcaggaagatcgcactccagccagctttccggcaccgcttctggtgccggaaaccaggcaaagcgccattcgccattcaggctgcgcaactgttgggaagggcgatcggtgcgggcctcttcgctattacgccagctggcgaaagggggatgtgctgcaaggcgattaagttgggtaacgccagggttttcccagtcacgacgttgtaaaacgacggccagtgaatccgtaatcatggtcatagctgtttcctgtgtgaaattgttatccgctcacaattccacacaacatacgagccggaagcataaagtgtaaagcctggggtgcctaatgagtgagctaacttacattaattgcgttgcgctcactgcccgctttccagtcgggaaacctgtcgtgccagctgcattaatgaatcggccaacgcgcggggagaggcggtttgcgtattgggcgccagggtggtttttcttttcaccagtgagacgggcaacagctgattgcccttcaccgcctggccctgagagagttgcagcaagcggtccacgctggtttgccccagcaggcgaaaatcctgtttgatggtggttaacggcgggatataacatgagctgtcttcggtatcgtcgtatcccactaccgagatatccgcaccaacgcgcagcccggactcggtaatggcgcgcattgcgcccagcgccatctgatcgttggcaaccagcatcgcagtgggaacgatgccctcattcagcatttgcatggtttgttgaaaaccggacatggcactccagtcgccttcccgttccgctatcggctgaatttgattgcgagtgagatatttatgccagccagccagacgcagacgcgccgagacagaacttaatgggcccgctaacagcgcgatttgctggtgacccaatgcgaccagatgctccacgcccagtcgcgtaccgtcttcatgggagaaaataatactgttgatgggtgtctggtcagagacatcaagaaataacgccggaacattagtgcaggcagcttccacagcaatggcatcctggtcatccagcggatagttaatgatcagcccactgacgcgttgcgcgagaagattgtgcaccgccgctttacaggcttcgacgccgcttcgttctaccatcgacaccaccacgctggcacccagttgatcggcgcgagatttaatcgccgcgacaatttgcgacggcgcgtgcagggccagactggaggtggcaacgccaatcagcaacgactgtttgcccgccagttgttgtgccacgcggttgggaatgtaattcagctccgccatcgccgcttccactttttcccgcgttttcgcagaaacgtggctggcctggttcaccacgcgggaaacggtctgataagagacaccggcatactctgcgacatcgtataacgttactggtttcacattcaccaccctgaattgactctcttccgggcgctatcatgccataccgcgaaaggttttgcaccattccatggtgtcggaattgctgcaggtcgagggggtcatggctgcgccccgacacccgccaacacccgctgacgcgccctgacgggcttgtctgctcccggcatccgcttacagacaagctgtgaccgtctccgggagctgcatgtgtcagaggttttcaccgtcatcaccgaaacgcgcgaggcaggatggcgcccaacagtcccccggccacggggcctgccaccatacccacgccgaaacaagcgctcatgagcccgaagtggcgagcccgatcttccccatcggtgatgtcggcgatataggcgccagcaaccgcacctgtggcgccggtgatgccggccacgatgcgtccggcgtagaggatccgtcgacctgcaggggggggggggcgctgaggtctgcctcgtgaagaaggtgttgctgactcataccaggcctgaatcgccccatcatccagccagaaagtgagggagccacggttgatgagagctttgttgtaggtggaccagttggtgattttgaacttttgctttgccacggaacggtctgcgttgtcgggaagatgcgtgatctgatccttcaactcagcaaaagttcgatttattcaacaaagccgccgtcccgtcaagtcagcgtaatgctctgccagtgttacaaccaattaaccaattctgattagaaaaactcatcgagcatcaaatgaaactgcaatttattcatatcaggattatcaataccatatttttgaaaaagccgtttctgtaatgaaggagaaaactcaccgaggcagttccataggatggcaagatcctggtatcggtctgcgattccgactcgtccaacatcaatacaacctattaatttcccctcgtcaaaaataaggttatcaagtgagaaatcaccatgagtgacgactgaatccggtgagaatggcaaaagcttatgcatttctttccagacttgttcaacaggccagccattacgctcgtcatcaaaatcactcgcatcaaccaaaccgttattcattcgtgattgcgcctgagcgagacgaaatacgcgatcgctgttaaaaggacaattacaaacaggaatcgaatgcaaccggcgcaggaacactgccagcgcatcaacaatattttcacctgaatcaggatattcttctaatacctggaatgctgttttcccggggatcgcagtggtgagtaaccatgcatcatcaggagtacggataaaatgcttgatggtcggaagaggcataaattccgtcagccagtttagtctgaccatctcatctgtaacatcattggcaacgctacctttgccatgtttcagaaacaactctggcgcatcgggcttcccatacaatcgatagattgtcgcacctgattgcccgacattatcgcgagcccatttatacccatataaatcagcatccatgttggaatttaatcgcggcctcgagcaagacgtttcccgttgaatatggctcat

SEQ ID NO: 160 - DNA, 5341 bp, Artificial
  Synthetic
aacaccccttgtattactgtttatgtaagcagacagttttattgttcatgatgatatatttttatcttgtgcaatgtaacatcagagattttgagacacaacgtggctttccatcaaaaaaatattgacaacataaaaaactttgtgttatacttgtggaattgtgagcggataacaattctatatctgttattttttccaaccacagatctatgagcaaaggtgaagaactgtttaccggcgtgagcaagggcgaggagctgatcaaggagaacatgcacaccaagctgtacctgacaggcaccgtgaacaaccactacttcgaatgcaccgccgaaggggagggcaagccctacgagggcacccagaccaacagatcaaggtggtgcgcggaggccccctgccgttcgcattcgacatcctggccccctgctttatgtacgggagcaagaccttcattaaccatccacctgacattcccgattattttaagcagtccttccctgagggcttcacatgggagagaaccaccgtttacgaagacgggggcacactcactgctacacaggacaccagcctccaggacggctgcctgatctacaacgtccaagtcagaggggagaacttcccatccaacggccctgtgatgcagaagaaaacactcggctgggaggccagtaccgagaccctgtaccccgctgacggcagcctggaaggcagactggactgggccctgaagctcgtgggcgggggccacctgcactgcagactggaaaccacatacagatccaagaaacccgcaaagaacctcaagatgcccggcgtctattttattgacaggagactggaaagaatcaaggaggccgacaatgagacctacgtcgagcagcacgaggtggctgtggccagatactgcgacctccctagcaaactggggcacaaacttaatggcatggacgagctgtacaagtaagtcgaccggctgctaacaaagcccgcggccgctgaagatcgatctcgacgagtgagagaagattttcagcctgatacagattaaatcagaacgcagaagcggtctgataaaacagaatttgcctggcggcagtagcgcggtggtcccacctgaccccatgccgaactcagaagtgaaacgccgtagcgccgatggtagtgtggggtcaccccatgcgagagtagggaactgccaggcatcaaataaaacgaaaggctcagtcgaaagactgggcctttcgttttatctgttgtttgtcggtgaacgctctcctgagtaggacaaatccgccgggagcggatttgaacgttgcgaagcaacggcccggagggtggcgggcaggacgcccgccataaactgccaggcatcaaattaagcagaaggccatcctgacggatggcctttttgcgtttctacagagcgtcagaccccttaataagatgatcttcttgagatcgttttggtctgcgcgtaatctcttgctctgaaaacgaaaaaaccgccttgcagggcggtttttcgaaggttctctgagctaccaactctttgaaccgaggtaactggcttggaggagcgcagtcaccaaaacttgtcctttcagtttagccttaaccggcgcatgacttcaagactaactcctctaaatcaattaccagtggctgctgccagtggtgcttttgcatgtctttccgggttggactcaagacgatagttaccggataaggcgcagcggtcggactgaacggggggttcgtgcatacagtccagcttggagcgaactgcctacccggaactgagtgtcaggcgtggaatgagacaaacgcggccataacagcggaatgacaccggtaaaccgaaaggcaggaacaggagagcgcacgagggagccgccagggggaaacgcctggtatctttatagtcctgtcgggtttcgccaccactgatttgagcgtcagatttcgtgatgcttgtcaggggggcggagcctatggaaaaacggctttgccgcggccctctcggatctgtatggtgcactctcagtacaatctgctctgatgccgcatagttaagccagtatacactccgctatcgctacgtgactgcctcgacctgcagcaattccaacgccatcaaaaataattcgcgtctggccttcctgtagccagctttcatcaacattaaatgtgagcgagtaacaacccgtcggattctccgtgggaacaaacggcggattgaccgtaatgggataggtcacgttggtgtagatgggcgcatcgtaaccgtgcatctgccagtttgaggggacgacgacagtatcggcctcaggaagatcgcactccagccagctttccggcaccgcttctggtgccggaaaccaggcaaagcgccattcgccattcaggctgcgcaactgttgggaagggcgatcggtgcgggcctcttcgctattacgccagctggcgaaagggggatgtgctgcaaggcgattaagttgggtaacgccagggttttcccagtcacgacgttgtaaaacgacggccagtgaatccgtaatcatggtcatagctgtttcctgtgtgaaattgttatccgctcacaattccacacaacatacgagccggaagcataaagtgtaaagcctggggtgcctaatgagtgagctaacttacattaattgcgttgcgctcactgcccgctttccagtcgggaaacctgtcgtgccagctgcattaatgaatcggccaacgcgcggggagaggcggtttgcgtattgggcgccagggtggtttttcttttcaccagtgagacgggcaacagctgattgcccttcaccgcctggccctgagagagttgcagcaagcggtccacgctggtttgccccagcaggcgaaaatcctgtttgatggtggttaacggcgggatataacatgagctgtcttcggtatcgtcgtatcccactaccgagatatccgcaccaacgcgcagcccggactcggtaatggcgcgcattgcgcccagcgccatctgatcgttggcaaccagcatcgcagtgggaacgatgccctcattcagcatttgcatggtttgttgaaaaccggacatggcactccagtcgccttcccgttccgctatcggctgaatttgattgcgagtgagatatttatgccagccagccagacgcagacgcgccgagacagaacttaatgggcccgctaacagcgcgatttgctggtgacccaatgcgaccagatgctccacgcccagtcgcgtaccgtcttcatgggagaaaataatactgttgatgggtgtctggtcagagacatcaagaaataacgccggaacattagtgcaggcagcttccacagcaatggcatcctggtcatccagcggatagttaatgatcagcccactgacgcgttgcgcgagaagattgtgcaccgccgctttacaggcttcgacgccgcttcgttctaccatcgacaccaccacgctggcacccagttgatcggcgcgagatttaatcgccgcgacaatttgcgacggcgcgtgcagggccagactggaggtggcaacgccaatcagcaacgactgtttgcccgccagttgttgtgccacgcggttgggaatgtaattcagctccgccatcgccgcttccactttttcccgcgttttcgcagaaacgtggctggcctggttcaccacgcgggaaacggtctgataagagacaccggcatactctgcgacatcgtataacgttactggtttcacattcaccaccctgaattgactctcttccgggcgctatcatgccataccgcgaaaggttttgcaccattccatggtgtcggaattgctgcaggtcgagggggtcatggctgcgccccgacacccgccaacacccgctgacgcgccctgacgggcttgtctgctcccggcatccgcttacagacaagctgtgaccgtctccgggagctgcatgtgtcagaggttttcaccgtcatcaccgaaacgcgcgaggcaggatggcgcccaacagtcccccggccacggggcctgccaccatacccacgccgaaacaagcgctcatgagcccgaagtggcgagcccgatcttccccatcggtgatgtcggcgatataggcgccagcaaccgcacctgtggcgccggtgatgccggccacgatgcgtccggcgtagaggatccgtcgacctgcaggggggggggggcgctgaggtctgcctcgtgaagaaggtgttgctgactcataccaggcctgaatcgccccatcatccagccagaaagtgagggagccacggttgatgagagctttgttgtaggtggaccagttggtgattttgaacttttgctttgccacggaacggtctgcgttgtcgggaagatgcgtgatctgatccttcaactcagcaaaagttcgatttattcaacaaagccgccgtcccgtcaagtcagcgtaatgctctgccagtgttacaaccaattaaccaattctgattagaaaaactcatcgagcatcaaatgaaactgcaatttattcatatcaggattatcaataccatatttttgaaaaagccgtttctgtaatgaaggagaaaactcaccgaggcagttccataggatggcaagatcctggtatcggtctgcgattccgactcgtccaacatcaatacaacctattaatttcccctcgtcaaaaataaggttatcaagtgagaaatcaccatgagtgacgactgaatccggtgagaatggcaaaagcttatgcatttctttccagacttgttcaacaggccagccattacgctcgtcatcaaaatcactcgcatcaaccaaaccgttattcattcgtgattgcgcctgagcgagacgaaatacgcgatcgctgttaaaaggacaattacaaacaggaatcgaatgcaaccggcgcaggaacactgccagcgcatcaacaatattttcacctgaatcaggatattcttctaatacctggaatgctgttttcccggggatcgcagtggtgagtaaccatgcatcatcaggagtacggataaaatgcttgatggtcggaagaggcataaattccgtcagccagtttagtctgaccatctcatctgtaacatcattggcaacgctacctttgccatgtttcagaaacaactctggcgcatcgggcttcccatacaatcgatagattgtcgcacctgattgcccgacattatcgcgagcccatttatacccatataaatcagcatccatgttggaatttaatcgcggcctcgagcaagacgtttcccgttgaatatggctcat

SEQ ID NO: 161 - DNA, 6114 bp, Artificial
  Synthetic
tcagatccttccgtatttagccagtatgttctctagtgtggttcgttgtttttgcgtgagccatgagaacgaaccattgagatcatgcttactttgcatgtcactcaaaaattttgcctcaaaactggtgagctgaatttttgcagttaaagcatcgtgtagtgtttttcttagtccgttacgtaggtaggaatctgatgtaatggttgttggtattttgtcaccattcatttttatctggttgttctcaagttcggttacgagatccatttgtctatctagttcaacttggaaaatcaacgtatcagtcgggcggcctcgcttatcaaccaccaatttcatattgctgtaagtgtttaaatctttacttattggtttcaaaacccattggttaagccttttaaactcatggtagttattttcaagcattaacatgaacttaaattcatcaaggctaatctctatatttgccttgtgagttttcttttgtgttagttcttttaataaccactcataaatcctcatagagtatttgttttcaaaagacttaacatgttccagattatattttatgaatttttttaactggaaaagataaggcaatatctcttcactaaaaactaattctaatttttcgcttgagaacttggcatagtttgtccactggaaaatcttaaagcctttaaccaaaggattcctgatttccacagttctcgtcatcagctctctggttgctttagctaatacaccataagcattttccctactgatgttcatcatctgagcgtattggttataagtgaacgataccgtccgttctttccttgtagggttttcaatcgtggggttgagtagtgccacacagcataaaattagcttggtttcatgctccgttaagtcatagcgactaatcgctagttcatttgctttgaaaacaactaattcagacatacatctcaattggtctaggtgattttaatcactataccaattgagatgggctagtcaatgataattactagtccttttcctttgagttgtgggtatctgtaaattctgctagacctttgctggaaaacttgtaaattctgctagaccctctgtaaattccgctagacctttgtgtgttttttttgtttatattcaagtggttataatttatagaataaagaaagaataaaaaaagataaaaagaatagatcccagccctgtgtataactcactactttagtcagttccgcagtattacaaaaggatgtcgcaaacgctgtttgctcctctacaaaacagaccttaaaaccctaaaggcttaagtagcaccctcgcaagctcgggcaaatcgctgaatattccttttgtctccgaccatcaggcacctgagtcgctgtctttttcgtgacattcagttcgctgcgctcacggctctggcagtgaatgggggtaaatggcactacaggcgccttttatggattcatgcaaggaaactacccataatacaagaaaagcccgtcacgggcttctcagggcgttttatggcgggtctgctatgtggtgctatctgactttttgctgttcagcagttcctgccctctgattttccagtctgaccacttcggattatcccgtgacaggtcattcagactggctaatgcacccagtaaggcagcggtatcatcaacaggcttacccgtcttactgtcaagaggacatccggtcaaataaaacgaaaggctcagtcgaaagactgggcctttcgttttgctgaggagacttagggaccctttatgacaacttgacggctacatcattcactttttcttcacaaccggcacggaactcgctcgggctggccccggtgcattttttaaatacccgcgagaaatagagttgatcgtcaaaaccaacattgcgaccgacggtggcgataggcatccgggtggtgctcaaaagcagcttcgcctggctgatacgttggtcctcgcgccagcttaagacgctaatccctaactgctggcggaaaagatgtgacagacgcgacggcgacaagcaaacatgctgtgcgacgctggcgatatcaaaattgctgtctgccaggtgatcgctgatgtactgacaagcctcgcgtacccgattatccatcggtggatggagcgactcgttaatcgcttccatgcgccgcagtaacaattgctcaagcagatttatcgccagcagctccgaatagcgcccttccccttgcccggcgttaatgatttgcccaaacaggtcgctgaaatgcggctggtgcgcttcatccgggcgaaagaaccccgtattggcaaatattgacggccagttaagccattcatgccagtaggcgcgcggacgaaagtaaacccactggtgataccattcgcgagcctccggatgacgaccgtagtgatgaatctctcctggcgggaacagcaaaatatcacccggtcggcaaacaaattctcgtccctgatttttcaccaccccctgaccgcgaatggtgagattgagaatataacctttcattcccagcggtcggtcgataaaaaaatcgagataaccgttggcctcaatcggcgttaaacccgccaccagatgggcattaaacgagtatcccggcagcaggggatcattttgcgcttcagccatacttttcatactcccaccattcagagaagaaaccaattgtccatattgcatcagacattgccgtcactgcgtcttttactggctcttctcgctaacccaaccggtaaccccgcttattaaaagcattctgtaacaaagcgggaccaaagccatgacaaaaacgcgtaacaaaagtgtctataatcacggcagaaaagtccacattgattatttgcacggcgtcacactttgctatgccatagcatttttatccataagattagcggatcctacctgacgctttttatcgcaactctctactgtttctccatacccgttttacctgcaggtgcagttttattttgggagttacaccttggctaacattaagtctgctaagaagcgtgcaatccaagccgaaaagcgtcgtcagcacaacgctagccgtcgttcaatgactcgtacaagcatcaagaaagttatcgctgcaattgcaagcggtgacaaagaagcggcacaagctgcacttactgctgctactccagtacttgacagaatggctactaaaggcttgattcacaagaacaaagctgctcgtcataagagccgtctagctgcacaaatcaaagcactaggttaatctttacgacaacgagtttgaggcatttatggttactattcgtttacagcgtggtggcgcgaaaaagcgtccattttatcaactagtggtggctgatagccgtcgtgcaagaaacggtcgtttcattgaaaacatcggtttcttcaacccaactgcacaaggtcaagcggagcgtcttcgcgtagatctagagcgtgttgaatactgggttggtgtaggcgcgagcttatcagatcgcgtttctagcttggtaaaagaagcgaaaaaatctgcagcgtaagctgttatttaaaagttatttgagacttatgactgaaaattttgcacaactttttgaagaaagcttacaagaactagaaacacgtcctggttcaattgtaaaaggtactgttgtttctatcgacaaagacatcgttcttgttgatgcaggcttgaaatcagaaagtgctatcccagctgaccaattcaaaaacgctgaaggcgaactagaaatcgctatcggtgaccaagtagacgtagcactagatgcagttgaagatggtttcggtgaaactatcctttctcgcgaaaaagcgaagcgtcacgaagcgtgggttgagctggaaaaagcttacgaagataaagctactatcaaaggcgttatcaacggtaaagttaaaggtggtttcactgttgaagttaacagtgtacgcgcgttccttcctggttctcttgttgacgtacgtccagtacgtgacactacgcaccttgaaggcaaagagcttgaatttaaagttatcaagcttgacgctaagcgtaacaacgttgttgtttctcgtcgtgcagttatcgaagcagaaagcagcgcagagcgcgaaacgcttcttgctaaccttgaagaaggtcatgaaatcaagggtatcgttaagaaccttaccgattacggtgcgttcgttgaccttggtggcgtagacggtcttctacacatcactgacatggcttggaagcgcgttaagcacccaagtgaaatcgtgaatgttggtgacgaaatcaacgttaaagtacttaagttcgacaaagagaagcagcgtgtttctcttggcatgaagcaaatgggcaacgatccatggcaagaaattgcttctcgttacccagaaggtactaagatcaacggtcaggttactaaccttactgactacggctgcttcgttgaaatcgaagacggcgttgaaggtcttgtacacgtttctgaaatggattggactaacaagaacatccacccatctaaagttgttaacctaggtgacactgtagatgtaatggttcttgaaattgacgaagagcgtcgtcgtatttctctaggtcttaagcagtgcattgctaacccttgggaaacatttgctgagtcacacgaaaaaggtgacaaagtgtctggtaagatcaagtcaatcactgacttcggtatcttcatcggtcttgacggcggcatcgacggtctagttcacctttctgacatcagctggaacaagtctggtgaagacgcggttcgcgactacaagaaaggcgacgaaatctctgcagttgtacttcaagtcgacccagagcgtgagcgtatctctcttggcgttaagcaaatcgaagaagatcctttcaacaagtatctgacagataacaagaaaggtgctatcgttactggtacagtaacagcagttgatgcgaaaggcgttactgtaaacctagctgaagaagttgacggctacatccgcgttgcagatcttgctgtagagcgtgttgaagacgcaacagaagtagcaagcgttggtgatagcatcgaagcgaagttcatgggcgttgaccgtaagaaccgcactgttaacctatctgttaaagcgaaagatcaggctgacgaaaaagaagctatcgataaagttaaccagcaagaagatgttggtttcgctaacgcgatggcagaagcatttaaagctgctaaaggcgaataatgcttttgacttaattaacggcactcctcagccaagtcaaaagcctccggtcggaggcttttgactacatgcccatggcgtttacgccccgccctgccactcatcgcagtactgttgtaattcattaagcattctgccgacatggaagccatcacaaacggcatgatgaacctgaatcgccagcggcatcagcaccttgtcgccttgcgtataatatttgcccatagtgaaaacgggggcgaagaagttgtccatattggccacgtttaaatcaaaactggtgaaactcacccagggattggctgagacgaaaaacatattctcaataaaccctttagggaaataggccaggttttcaccgtaacacgccacatcttgcgaatatatgtgtagaaactgccggaaatcgtcgtggtattcactccagagcgatgaaaacgtttcagtttgctcatggaaaacggtgtaacaagggtgaacactatcccatatcaccagctcaccgtctttcattgccatacggaactccggatgagcattcatcaggcgggcaagaatgtgaataaaggccggataaaacttgtgcttatttttctttacggtctttaaaaaggccgtaatatccagctgaacggtctggttataggtacattgagcaactgactgaaatgcctcaaaatgttctttacgatgccattgggatatatcaacggtggtatatccagtgatttttttctccattttagcttccttagctcctgaaaatctcgataactcaaaaaatacgcccggtagtgatcttatttcattatggtgaaagttggaacctcttacgtgccaggccaaataggccgt

SEQ ID NO: 162 - DNA, 4713 bp, Artificial
  Synthetic
tcagatccttccgtatttagccagtatgttctctagtgtggttcgttgtttttgcgtgagccatgagaacgaaccattgagatcatgcttactttgcatgtcactcaaaaattttgcctcaaaactggtgagctgaatttttgcagttaaagcatcgtgtagtgtttttcttagtccgttacgtaggtaggaatctgatgtaatggttgttggtattttgtcaccattcatttttatctggttgttctcaagttcggttacgagatccatttgtctatctagttcaacttggaaaatcaacgtatcagtcgggcggcctcgcttatcaaccaccaatttcatattgctgtaagtgtttaaatctttacttattggtttcaaaacccattggttaagccttttaaactcatggtagttattttcaagcattaacatgaacttaaattcatcaaggctaatctctatatttgccttgtgagttttcttttgtgttagttcttttaataaccactcataaatcctcatagagtatttgttttcaaaagacttaacatgttccagattatattttatgaatttttttaactggaaaagataaggcaatatctcttcactaaaaactaattctaatttttcgcttgagaacttggcatagtttgtccactggaaaatcttaaagcctttaaccaaaggattcctgatttccacagttctcgtcatcagctctctggttgctttagctaatacaccataagcattttccctactgatgttcatcatctgagcgtattggttataagtgaacgataccgtccgttctttccttgtagggttttcaatcgtggggttgagtagtgccacacagcataaaattagcttggtttcatgctccgttaagtcatagcgactaatcgctagttcatttgctttgaaaacaactaattcagacatacatctcaattggtctaggtgattttaatcactataccaattgagatgggctagtcaatgataattactagtccttttcctttgagttgtgggtatctgtaaattctgctagacctttgctggaaaacttgtaaattctgctagaccctctgtaaattccgctagacctttgtgtgttttttttgtttatattcaagtggttataatttatagaataaagaaagaataaaaaaagataaaaagaatagatcccagccctgtgtataactcactactttagtcagttccgcagtattacaaaaggatgtcgcaaacgctgtttgctcctctacaaaacagaccttaaaaccctaaaggcttaagtagcaccctcgcaagctcgggcaaatcgctgaatattccttttgtctccgaccatcaggcacctgagtcgctgtctttttcgtgacattcagttcgctgcgctcacggctctggcagtgaatgggggtaaatggcactacaggcgccttttatggattcatgcaaggaaactacccataatacaagaaaagcccgtcacgggcttctcagggcgttttatggcgggtctgctatgtggtgctatctgactttttgctgttcagcagttcctgccctctgattttccagtctgaccacttcggattatcccgtgacaggtcattcagactggctaatgcacccagtaaggcagcggtatcatcaacaggcttacccgtcttactgtcaagaggacatccggtcaaataaaacgaaaggctcagtcgaaagactgggcctttcgttttgctgaggagacttagggaccctttatgacaacttgacggctacatcattcactttttcttcacaaccggcacggaactcgctcgggctggccccggtgcattttttaaatacccgcgagaaatagagttgatcgtcaaaaccaacattgcgaccgacggtggcgataggcatccgggtggtgctcaaaagcagcttcgcctggctgatacgttggtcctcgcgccagcttaagacgctaatccctaactgctggcggaaaagatgtgacagacgcgacggcgacaagcaaacatgctgtgcgacgctggcgatatcaaaattgctgtctgccaggtgatcgctgatgtactgacaagcctcgcgtacccgattatccatcggtggatggagcgactcgttaatcgcttccatgcgccgcagtaacaattgctcaagcagatttatcgccagcagctccgaatagcgcccttccccttgcccggcgttaatgatttgcccaaacaggtcgctgaaatgcggctggtgcgcttcatccgggcgaaagaaccccgtattggcaaatattgacggccagttaagccattcatgccagtaggcgcgcggacgaaagtaaacccactggtgataccattcgcgagcctccggatgacgaccgtagtgatgaatctctcctggcgggaacagcaaaatatcacccggtcggcaaacaaattctcgtccctgatttttcaccaccccctgaccgcgaatggtgagattgagaatataacctttcattcccagcggtcggtcgataaaaaaatcgagataaccgttggcctcaatcggcgttaaacccgccaccagatgggcattaaacgagtatcccggcagcaggggatcattttgcgcttcagccatacttttcatactcccaccattcagagaagaaaccaattgtccatattgcatcagacattgccgtcactgcgtcttttactggctcttctcgctaacccaaccggtaaccccgcttattaaaagcattctgtaacaaagcgggaccaaagccatgacaaaaacgcgtaacaaaagtgtctataatcacggcagaaaagtccacattgattatttgcacggcgtcacactttgctatgccatagcatttttatccataagattagcggatcctacctgacgctttttatcgcaactctctactgtttctccatacccgttttacctgcaggtgcagttttattttgggagttacaccttggctaacattaagtctgctaagaagcgtgcaatccaagccgaaaagcgtcgtcagcacaacgctagccgtcgttcaatgactcgtacaagcatcaagaaagttatcgctgcaattgcaagcggtgacaaagaagcggcacaagctgcacttactgctgctactccagtacttgacagaatggctactaaaggcttgattcacaagaacaaagctgctcgtcataagagccgtctagctgcacaaatcaaagcactaggttaatctttacgacaacgagtttgaggcatttatggttactattcgtttacagcgtggtggcgcgaaaaagcgtccattttatcaactagtggtggctgatagccgtcgtgcaagaaacggtcgtttcattgaaaacatcggtttcttcaacccaactgcacaaggtcaagcggagcgtcttcgcgtagatctagagcgtgttgaatactgggttggtgtaggcgcgagcttatcagatcgcgtttctagcttggtaaaagaagcgaaaaaatctgcagcgtaagctgttatattaatattaggagaatgatatgtcactaactaaagcagaaaccgcaaaaatcattgctgagtacggcgttaaagaaggcgacactggttcaccagaagttcaagttgctttgcttactcacaacatcaacaagcttcaaggtcactttgctgatcacaagaaagatcaccactcacgtcgtggtcttctacgtatggttagccaacgtcgtaagcttctagactaccttaaaggcaagaacgcagagcgttaccttgaccttatcaagcgtctaggtctacgtcgataagactaggtacttaattaacggcactcctcagccaagtcaaaagcctccggtcggaggcttttgactacatgcccatggcgtttacgccccgccctgccactcatcgcagtactgttgtaattcattaagcattctgccgacatggaagccatcacaaacggcatgatgaacctgaatcgccagcggcatcagcaccttgtcgccttgcgtataatatttgcccatagtgaaaacgggggcgaagaagttgtccatattggccacgtttaaatcaaaactggtgaaactcacccagggattggctgagacgaaaaacatattctcaataaaccctttagggaaataggccaggttttcaccgtaacacgccacatcttgcgaatatatgtgtagaaactgccggaaatcgtcgtggtattcactccagagcgatgaaaacgtttcagtttgctcatggaaaacggtgtaacaagggtgaacactatcccatatcaccagctcaccgtctttcattgccatacggaactccggatgagcattcatcaggcgggcaagaatgtgaataaaggccggataaaacttgtgcttatttttctttacggtctttaaaaaggccgtaatatccagctgaacggtctggttataggtacattgagcaactgactgaaatgcctcaaaatgttctttacgatgccattgggatatatcaacggtggtatatccagtgatttttttctccattttagcttccttagctcctgaaaatctcgataactcaaaaaatacgcccggtagtgatcttatttcattatggtgaaagttggaacctcttacgtgccaggccaaataggccgt

SEQ ID NO: 163 - DNA, 4845 bp, Artificial
  Synthetic
tcagatccttccgtatttagccagtatgttctctagtgtggttcgttgtttttgcgtgagccatgagaacgaaccattgagatcatgcttactttgcatgtcactcaaaaattttgcctcaaaactggtgagctgaatttttgcagttaaagcatcgtgtagtgtttttcttagtccgttacgtaggtaggaatctgatgtaatggttgttggtattttgtcaccattcatttttatctggttgttctcaagttcggttacgagatccatttgtctatctagttcaacttggaaaatcaacgtatcagtcgggcggcctcgcttatcaaccaccaatttcatattgctgtaagtgtttaaatctttacttattggtttcaaaacccattggttaagccttttaaactcatggtagttattttcaagcattaacatgaacttaaattcatcaaggctaatctctatatttgccttgtgagttttcttttgtgttagttcttttaataaccactcataaatcctcatagagtatttgttttcaaaagacttaacatgttccagattatattttatgaatttttttaactggaaaagataaggcaatatctcttcactaaaaactaattctaatttttcgcttgagaacttggcatagtttgtccactggaaaatcttaaagcctttaaccaaaggattcctgatttccacagttctcgtcatcagctctctggttgctttagctaatacaccataagcattttccctactgatgttcatcatctgagcgtattggttataagtgaacgataccgtccgttctttccttgtagggttttcaatcgtggggttgagtagtgccacacagcataaaattagcttggtttcatgctccgttaagtcatagcgactaatcgctagttcatttgctttgaaaacaactaattcagacatacatctcaattggtctaggtgattttaatcactataccaattgagatgggctagtcaatgataattactagtccttttcctttgagttgtgggtatctgtaaattctgctagacctttgctggaaaacttgtaaattctgctagaccctctgtaaattccgctagacctttgtgtgttttttttgtttatattcaagtggttataatttatagaataaagaaagaataaaaaaagataaaaagaatagatcccagccctgtgtataactcactactttagtcagttccgcagtattacaaaaggatgtcgcaaacgctgtttgctcctctacaaaacagaccttaaaaccctaaaggcttaagtagcaccctcgcaagctcgggcaaatcgctgaatattccttttgtctccgaccatcaggcacctgagtcgctgtctttttcgtgacattcagttcgctgcgctcacggctctggcagtgaatgggggtaaatggcactacaggcgccttttatggattcatgcaaggaaactacccataatacaagaaaagcccgtcacgggcttctcagggcgttttatggcgggtctgctatgtggtgctatctgactttttgctgttcagcagttcctgccctctgattttccagtctgaccacttcggattatcccgtgacaggtcattcagactggctaatgcacccagtaaggcagcggtatcatcaacaggcttacccgtcttactgtcaagaggacatccggtcaaataaaacgaaaggctcagtcgaaagactgggcctttcgttttgctgaggagacttagggaccctttatgacaacttgacggctacatcattcactttttcttcacaaccggcacggaactcgctcgggctggccccggtgcattttttaaatacccgcgagaaatagagttgatcgtcaaaaccaacattgcgaccgacggtggcgataggcatccgggtggtgctcaaaagcagcttcgcctggctgatacgttggtcctcgcgccagcttaagacgctaatccctaactgctggcggaaaagatgtgacagacgcgacggcgacaagcaaacatgctgtgcgacgctggcgatatcaaaattgctgtctgccaggtgatcgctgatgtactgacaagcctcgcgtacccgattatccatcggtggatggagcgactcgttaatcgcttccatgcgccgcagtaacaattgctcaagcagatttatcgccagcagctccgaatagcgcccttccccttgcccggcgttaatgatttgcccaaacaggtcgctgaaatgcggctggtgcgcttcatccgggcgaaagaaccccgtattggcaaatattgacggccagttaagccattcatgccagtaggcgcgcggacgaaagtaaacccactggtgataccattcgcgagcctccggatgacgaccgtagtgatgaatctctcctggcgggaacagcaaaatatcacccggtcggcaaacaaattctcgtccctgatttttcaccaccccctgaccgcgaatggtgagattgagaatataacctttcattcccagcggtcggtcgataaaaaaatcgagataaccgttggcctcaatcggcgttaaacccgccaccagatgggcattaaacgagtatcccggcagcaggggatcattttgcgcttcagccatacttttcatactcccaccattcagagaagaaaccaattgtccatattgcatcagacattgccgtcactgcgtcttttactggctcttctcgctaacccaaccggtaaccccgcttattaaaagcattctgtaacaaagcgggaccaaagccatgacaaaaacgcgtaacaaaagtgtctataatcacggcagaaaagtccacattgattatttgcacggcgtcacactttgctatgccatagcatttttatccataagattagcggatcctacctgacgctttttatcgcaactctctactgtttctccatacccgttttacctgcaggtgcagttttattttgggagttacaccttggctaacattaagtctgctaagaagcgtgcaatccaagccgaaaagcgtcgtcagcacaacgctagccgtcgttcaatgactcgtacaagcatcaagaaagttatcgctgcaattgcaagcggtgacaaagaagcggcacaagctgcacttactgctgctactccagtacttgacagaatggctactaaaggcttgattcacaagaacaaagctgctcgtcataagagccgtctagctgcacaaatcaaagcactaggttaatctttacgacaacgagtttgaggcatttatggttactattcgtttacagcgtggtggcgcgaaaaagcgtccattttatcaactagtggtggctgatagccgtcgtgcaagaaacggtcgtttcattgaaaacatcggtttcttcaacccaactgcacaaggtcaagcggagcgtcttcgcgtagatctagagcgtgttgaatactgggttggtgtaggcgcgagcttatcagatcgcgtttctagcttggtaaaagaagcgaaaaaatctgcagcgtaagctgttattacaaccgtaaggagctataatgcgtcattacgaaatcgtatttatggttcaccctgatcagagtgaacaagtacctggtatgatcgagcgttataccacaatcctaaagcaagacggtggtcagattcatcgtttagaagattggggccgtcgtcaactggcttacccaattgaaaagctgcacaaagcccactacgtactaatcaatgctgaagcgtctgcagaagctgttgatgaattggaaaatgctttccgtttcaacgacgtgatcctacgtaacatggttatgcgcactaagactgctgtgactgagccttctccaatgatgaaagaagagcctcgtcgtgagcgtcgtgacgattctgctcctcgccaagatcgcgcggaaaagaaaactgaaaccactgaagacaacgcttaaggagatcaacttaattaacggcactcctcagccaagtcaaaagcctccggtcggaggcttttgactacatgcccatggcgtttacgccccgccctgccactcatcgcagtactgttgtaattcattaagcattctgccgacatggaagccatcacaaacggcatgatgaacctgaatcgccagcggcatcagcaccttgtcgccttgcgtataatatttgcccatagtgaaaacgggggcgaagaagttgtccatattggccacgtttaaatcaaaactggtgaaactcacccagggattggctgagacgaaaaacatattctcaataaaccctttagggaaataggccaggttttcaccgtaacacgccacatcttgcgaatatatgtgtagaaactgccggaaatcgtcgtggtattcactccagagcgatgaaaacgtttcagtttgctcatggaaaacggtgtaacaagggtgaacactatcccatatcaccagctcaccgtctttcattgccatacggaactccggatgagcattcatcaggcgggcaagaatgtgaataaaggccggataaaacttgtgcttatttttctttacggtctttaaaaaggccgtaatatccagctgaacggtctggttataggtacattgagcaactgactgaaatgcctcaaaatgttctttacgatgccattgggatatatcaacggtggtatatccagtgatttttttctccattttagcttccttagctcctgaaaatctcgataactcaaaaaatacgcccggtagtgatcttatttcattatggtgaaagttggaacctcttacgtgccaggccaaataggccgt

SEQ ID NO: 164 - DNA, 4671 bp, Artificial
  Synthetic
tcagatccttccgtatttagccagtatgttctctagtgtggttcgttgtttttgcgtgagccatgagaacgaaccattgagatcatgcttactttgcatgtcactcaaaaattttgcctcaaaactggtgagctgaatttttgcagttaaagcatcgtgtagtgtttttcttagtccgttacgtaggtaggaatctgatgtaatggttgttggtattttgtcaccattcatttttatctggttgttctcaagttcggttacgagatccatttgtctatctagttcaacttggaaaatcaacgtatcagtcgggcggcctcgcttatcaaccaccaatttcatattgctgtaagtgtttaaatctttacttattggtttcaaaacccattggttaagccttttaaactcatggtagttattttcaagcattaacatgaacttaaattcatcaaggctaatctctatatttgccttgtgagttttcttttgtgttagttcttttaataaccactcataaatcctcatagagtatttgttttcaaaagacttaacatgttccagattatattttatgaatttttttaactggaaaagataaggcaatatctcttcactaaaaactaattctaatttttcgcttgagaacttggcatagtttgtccactggaaaatcttaaagcctttaaccaaaggattcctgatttccacagttctcgtcatcagctctctggttgctttagctaatacaccataagcattttccctactgatgttcatcatctgagcgtattggttataagtgaacgataccgtccgttctttccttgtagggttttcaatcgtggggttgagtagtgccacacagcataaaattagcttggtttcatgctccgttaagtcatagcgactaatcgctagttcatttgctttgaaaacaactaattcagacatacatctcaattggtctaggtgattttaatcactataccaattgagatgggctagtcaatgataattactagtccttttcctttgagttgtgggtatctgtaaattctgctagacctttgctggaaaacttgtaaattctgctagaccctctgtaaattccgctagacctttgtgtgttttttttgtttatattcaagtggttataatttatagaataaagaaagaataaaaaaagataaaaagaatagatcccagccctgtgtataactcactactttagtcagttccgcagtattacaaaaggatgtcgcaaacgctgtttgctcctctacaaaacagaccttaaaaccctaaaggcttaagtagcaccctcgcaagctcgggcaaatcgctgaatattccttttgtctccgaccatcaggcacctgagtcgctgtctttttcgtgacattcagttcgctgcgctcacggctctggcagtgaatgggggtaaatggcactacaggcgccttttatggattcatgcaaggaaactacccataatacaagaaaagcccgtcacgggcttctcagggcgttttatggcgggtctgctatgtggtgctatctgactttttgctgttcagcagttcctgccctctgattttccagtctgaccacttcggattatcccgtgacaggtcattcagactggctaatgcacccagtaaggcagcggtatcatcaacaggcttacccgtcttactgtcaagaggacatccggtcaaataaaacgaaaggctcagtcgaaagactgggcctttcgttttgctgaggagacttagggaccctttatgacaacttgacggctacatcattcactttttcttcacaaccggcacggaactcgctcgggctggccccggtgcattttttaaatacccgcgagaaatagagttgatcgtcaaaaccaacattgcgaccgacggtggcgataggcatccgggtggtgctcaaaagcagcttcgcctggctgatacgttggtcctcgcgccagcttaagacgctaatccctaactgctggcggaaaagatgtgacagacgcgacggcgacaagcaaacatgctgtgcgacgctggcgatatcaaaattgctgtctgccaggtgatcgctgatgtactgacaagcctcgcgtacccgattatccatcggtggatggagcgactcgttaatcgcttccatgcgccgcagtaacaattgctcaagcagatttatcgccagcagctccgaatagcgcccttccccttgcccggcgttaatgatttgcccaaacaggtcgctgaaatgcggctggtgcgcttcatccgggcgaaagaaccccgtattggcaaatattgacggccagttaagccattcatgccagtaggcgcgcggacgaaagtaaacccactggtgataccattcgcgagcctccggatgacgaccgtagtgatgaatctctcctggcgggaacagcaaaatatcacccggtcggcaaacaaattctcgtccctgatttttcaccaccccctgaccgcgaatggtgagattgagaatataacctttcattcccagcggtcggtcgataaaaaaatcgagataaccgttggcctcaatcggcgttaaacccgccaccagatgggcattaaacgagtatcccggcagcaggggatcattttgcgcttcagccatacttttcatactcccaccattcagagaagaaaccaattgtccatattgcatcagacattgccgtcactgcgtcttttactggctcttctcgctaacccaaccggtaaccccgcttattaaaagcattctgtaacaaagcgggaccaaagccatgacaaaaacgcgtaacaaaagtgtctataatcacggcagaaaagtccacattgattatttgcacggcgtcacactttgctatgccatagcatttttatccataagattagcggatcctacctgacgctttttatcgcaactctctactgtttctccatacccgttttacctgcaggtgcagttttattttgggagttacaccttggctaacattaagtctgctaagaagcgtgcaatccaagccgaaaagcgtcgtcagcacaacgctagccgtcgttcaatgactcgtacaagcatcaagaaagttatcgctgcaattgcaagcggtgacaaagaagcggcacaagctgcacttactgctgctactccagtacttgacagaatggctactaaaggcttgattcacaagaacaaagctgctcgtcataagagccgtctagctgcacaaatcaaagcactaggttaatctttacgacaacgagtttgaggcatttatggttactattcgtttacagcgtggtggcgcgaaaaagcgtccattttatcaactagtggtggctgatagccgtcgtgcaagaaacggtcgtttcattgaaaacatcggtttcttcaacccaactgcacaaggtcaagcggagcgtcttcgcgtagatctagagcgtgttgaatactgggttggtgtaggcgcgagcttatcagatcgcgtttctagcttggtaaaagaagcgaaaaaatctgcagcgtaagctgttataacgcttaaggagatcacccatggctcgttttttcagacgtcgtaagttctgccgtttcactgcagaaggtgtgactgagattgattacaaagatatcgctactcttaagaactacatcactgagagcggtaaaattgtccctagccgtattactggtacaagcgcaaaatatcagcgtcagctgtcttctgcgatcaagcgcgcacgtttccttgcgttgcttccgtacactgattcacacaagtaatttggcgaacttaattaacggcactcctcagccaagtcaaaagcctccggtcggaggcttttgactacatgcccatggcgtttacgccccgccctgccactcatcgcagtactgttgtaattcattaagcattctgccgacatggaagccatcacaaacggcatgatgaacctgaatcgccagcggcatcagcaccttgtcgccttgcgtataatatttgcccatagtgaaaacgggggcgaagaagttgtccatattggccacgtttaaatcaaaactggtgaaactcacccagggattggctgagacgaaaaacatattctcaataaaccctttagggaaataggccaggttttcaccgtaacacgccacatcttgcgaatatatgtgtagaaactgccggaaatcgtcgtggtattcactccagagcgatgaaaacgtttcagtttgctcatggaaaacggtgtaacaagggtgaacactatcccatatcaccagctcaccgtctttcattgccatacggaactccggatgagcattcatcaggcgggcaagaatgtgaataaaggccggataaaacttgtgcttatttttctttacggtctttaaaaaggccgtaatatccagctgaacggtctggttataggtacattgagcaactgactgaaatgcctcaaaatgttctttacgatgccattgggatatatcaacggtggtatatccagtgatttttttctccattttagcttccttagctcctgaaaatctcgataactcaaaaaatacgcccggtagtgatcttatttcattatggtgaaagttggaacctcttacgtgccaggccaaataggccgt

SEQ ID NO: 165 - DNA, 4896 bp, Artificial
  Synthetic
tcagatccttccgtatttagccagtatgttctctagtgtggttcgttgtttttgcgtgagccatgagaacgaaccattgagatcatgcttactttgcatgtcactcaaaaattttgcctcaaaactggtgagctgaatttttgcagttaaagcatcgtgtagtgtttttcttagtccgttacgtaggtaggaatctgatgtaatggttgttggtattttgtcaccattcatttttatctggttgttctcaagttcggttacgagatccatttgtctatctagttcaacttggaaaatcaacgtatcagtcgggcggcctcgcttatcaaccaccaatttcatattgctgtaagtgtttaaatctttacttattggtttcaaaacccattggttaagccttttaaactcatggtagttattttcaagcattaacatgaacttaaattcatcaaggctaatctctatatttgccttgtgagttttcttttgtgttagttcttttaataaccactcataaatcctcatagagtatttgttttcaaaagacttaacatgttccagattatattttatgaatttttttaactggaaaagataaggcaatatctcttcactaaaaactaattctaatttttcgcttgagaacttggcatagtttgtccactggaaaatcttaaagcctttaaccaaaggattcctgatttccacagttctcgtcatcagctctctggttgctttagctaatacaccataagcattttccctactgatgttcatcatctgagcgtattggttataagtgaacgataccgtccgttctttccttgtagggttttcaatcgtggggttgagtagtgccacacagcataaaattagcttggtttcatgctccgttaagtcatagcgactaatcgctagttcatttgctttgaaaacaactaattcagacatacatctcaattggtctaggtgattttaatcactataccaattgagatgggctagtcaatgataattactagtccttttcctttgagttgtgggtatctgtaaattctgctagacctttgctggaaaacttgtaaattctgctagaccctctgtaaattccgctagacctttgtgtgttttttttgtttatattcaagtggttataatttatagaataaagaaagaataaaaaaagataaaaagaatagatcccagccctgtgtataactcactactttagtcagttccgcagtattacaaaaggatgtcgcaaacgctgtttgctcctctacaaaacagaccttaaaaccctaaaggcttaagtagcaccctcgcaagctcgggcaaatcgctgaatattccttttgtctccgaccatcaggcacctgagtcgctgtctttttcgtgacattcagttcgctgcgctcacggctctggcagtgaatgggggtaaatggcactacaggcgccttttatggattcatgcaaggaaactacccataatacaagaaaagcccgtcacgggcttctcagggcgttttatggcgggtctgctatgtggtgctatctgactttttgctgttcagcagttcctgccctctgattttccagtctgaccacttcggattatcccgtgacaggtcattcagactggctaatgcacccagtaaggcagcggtatcatcaacaggcttacccgtcttactgtcaagaggacatccggtcaaataaaacgaaaggctcagtcgaaagactgggcctttcgttttgctgaggagacttagggaccctttatgacaacttgacggctacatcattcactttttcttcacaaccggcacggaactcgctcgggctggccccggtgcattttttaaatacccgcgagaaatagagttgatcgtcaaaaccaacattgcgaccgacggtggcgataggcatccgggtggtgctcaaaagcagcttcgcctggctgatacgttggtcctcgcgccagcttaagacgctaatccctaactgctggcggaaaagatgtgacagacgcgacggcgacaagcaaacatgctgtgcgacgctggcgatatcaaaattgctgtctgccaggtgatcgctgatgtactgacaagcctcgcgtacccgattatccatcggtggatggagcgactcgttaatcgcttccatgcgccgcagtaacaattgctcaagcagatttatcgccagcagctccgaatagcgcccttccccttgcccggcgttaatgatttgcccaaacaggtcgctgaaatgcggctggtgcgcttcatccgggcgaaagaaccccgtattggcaaatattgacggccagttaagccattcatgccagtaggcgcgcggacgaaagtaaacccactggtgataccattcgcgagcctccggatgacgaccgtagtgatgaatctctcctggcgggaacagcaaaatatcacccggtcggcaaacaaattctcgtccctgatttttcaccaccccctgaccgcgaatggtgagattgagaatataacctttcattcccagcggtcggtcgataaaaaaatcgagataaccgttggcctcaatcggcgttaaacccgccaccagatgggcattaaacgagtatcccggcagcaggggatcattttgcgcttcagccatacttttcatactcccaccattcagagaagaaaccaattgtccatattgcatcagacattgccgtcactgcgtcttttactggctcttctcgctaacccaaccggtaaccccgcttattaaaagcattctgtaacaaagcgggaccaaagccatgacaaaaacgcgtaacaaaagtgtctataatcacggcagaaaagtccacattgattatttgcacggcgtcacactttgctatgccatagcatttttatccataagattagcggatcctacctgacgctttttatcgcaactctctactgtttctccatacccgttttacctgcaggtgcagttttattttgggagttacaccttggctaacattaagtctgctaagaagcgtgcaatccaagccgaaaagcgtcgtcagcacaacgctagccgtcgttcaatgactcgtacaagcatcaagaaagttatcgctgcaattgcaagcggtgacaaagaagcggcacaagctgcacttactgctgctactccagtacttgacagaatggctactaaaggcttgattcacaagaacaaagctgctcgtcataagagccgtctagctgcacaaatcaaagcactaggttaatctttacgacaacgagtttgaggcatttatggttactattcgtttacagcgtggtggcgcgaaaaagcgtccattttatcaactagtggtggctgatagccgtcgtgcaagaaacggtcgtttcattgaaaacatcggtttcttcaacccaactgcacaaggtcaagcggagcgtcttcgcgtagatctagagcgtgttgaatactgggttggtgtaggcgcgagcttatcagatcgcgtttctagcttggtaaaagaagcgaaaaaatctgcagcgtaagctgttatgaatataagggttagctaagatgaatatcatcctactagataaaatcgccaaccttggcggcctgggcgaccaagtgactgttaagtctggttacgctcgtaacttccttttcccacagggtaaagcggttcctgcaactaaagacaacgttgaaaagttcgaagcacgtcgtgctgaacttgaagcgaaaattgctgagcaactagctgctgctaacgcacgcgctgaaaaagttgctgagcttgctgaagttacaatcgcagctcctgctggtgacgaaggtaaactttttggctctgttggtactcgtgacatcgctgatgcaatcactgcagctggcgttgaagtacaaaaagcagaagttaaactacctactggtactcttcgtgaaactggtgagtatgacatcgacttacaacttcactctgacgttatcacttcaatcaaagtgatcatcattgctgaagcgtaatcggtgacacttaattaacggcactcctcagccaagtcaaaagcctccggtcggaggcttttgactacatgcccatggcgtttacgccccgccctgccactcatcgcagtactgttgtaattcattaagcattctgccgacatggaagccatcacaaacggcatgatgaacctgaatcgccagcggcatcagcaccttgtcgccttgcgtataatatttgcccatagtgaaaacgggggcgaagaagttgtccatattggccacgtttaaatcaaaactggtgaaactcacccagggattggctgagacgaaaaacatattctcaataaaccctttagggaaataggccaggttttcaccgtaacacgccacatcttgcgaatatatgtgtagaaactgccggaaatcgtcgtggtattcactccagagcgatgaaaacgtttcagtttgctcatggaaaacggtgtaacaagggtgaacactatcccatatcaccagctcaccgtctttcattgccatacggaactccggatgagcattcatcaggcgggcaagaatgtgaataaaggccggataaaacttgtgcttatttttctttacggtctttaaaaaggccgtaatatccagctgaacggtctggttataggtacattgagcaactgactgaaatgcctcaaaatgttctttacgatgccattgggatatatcaacggtggtatatccagtgatttttttctccattttagcttccttagctcctgaaaatctcgataactcaaaaaatacgcccggtagtgatcttatttcattatggtgaaagttggaacctcttacgtgccaggccaaataggccgt

SEQ ID NO: 166 - DNA, 4872 bp, Artificial
  Synthetic
tcagatccttccgtatttagccagtatgttctctagtgtggttcgttgtttttgcgtgagccatgagaacgaaccattgagatcatgcttactttgcatgtcactcaaaaattttgcctcaaaactggtgagctgaatttttgcagttaaagcatcgtgtagtgtttttcttagtccgttacgtaggtaggaatctgatgtaatggttgttggtattttgtcaccattcatttttatctggttgttctcaagttcggttacgagatccatttgtctatctagttcaacttggaaaatcaacgtatcagtcgggcggcctcgcttatcaaccaccaatttcatattgctgtaagtgtttaaatctttacttattggtttcaaaacccattggttaagccttttaaactcatggtagttattttcaagcattaacatgaacttaaattcatcaaggctaatctctatatttgccttgtgagttttcttttgtgttagttcttttaataaccactcataaatcctcatagagtatttgttttcaaaagacttaacatgttccagattatattttatgaatttttttaactggaaaagataaggcaatatctcttcactaaaaactaattctaatttttcgcttgagaacttggcatagtttgtccactggaaaatcttaaagcctttaaccaaaggattcctgatttccacagttctcgtcatcagctctctggttgctttagctaatacaccataagcattttccctactgatgttcatcatctgagcgtattggttataagtgaacgataccgtccgttctttccttgtagggttttcaatcgtggggttgagtagtgccacacagcataaaattagcttggtttcatgctccgttaagtcatagcgactaatcgctagttcatttgctttgaaaacaactaattcagacatacatctcaattggtctaggtgattttaatcactataccaattgagatgggctagtcaatgataattactagtccttttcctttgagttgtgggtatctgtaaattctgctagacctttgctggaaaacttgtaaattctgctagaccctctgtaaattccgctagacctttgtgtgttttttttgtttatattcaagtggttataatttatagaataaagaaagaataaaaaaagataaaaagaatagatcccagccctgtgtataactcactactttagtcagttccgcagtattacaaaaggatgtcgcaaacgctgtttgctcctctacaaaacagaccttaaaaccctaaaggcttaagtagcaccctcgcaagctcgggcaaatcgctgaatattccttttgtctccgaccatcaggcacctgagtcgctgtctttttcgtgacattcagttcgctgcgctcacggctctggcagtgaatgggggtaaatggcactacaggcgccttttatggattcatgcaaggaaactacccataatacaagaaaagcccgtcacgggcttctcagggcgttttatggcgggtctgctatgtggtgctatctgactttttgctgttcagcagttcctgccctctgattttccagtctgaccacttcggattatcccgtgacaggtcattcagactggctaatgcacccagtaaggcagcggtatcatcaacaggcttacccgtcttactgtcaagaggacatccggtcaaataaaacgaaaggctcagtcgaaagactgggcctttcgttttgctgaggagacttagggaccctttatgacaacttgacggctacatcattcactttttcttcacaaccggcacggaactcgctcgggctggccccggtgcattttttaaatacccgcgagaaatagagttgatcgtcaaaaccaacattgcgaccgacggtggcgataggcatccgggtggtgctcaaaagcagcttcgcctggctgatacgttggtcctcgcgccagcttaagacgctaatccctaactgctggcggaaaagatgtgacagacgcgacggcgacaagcaaacatgctgtgcgacgctggcgatatcaaaattgctgtctgccaggtgatcgctgatgtactgacaagcctcgcgtacccgattatccatcggtggatggagcgactcgttaatcgcttccatgcgccgcagtaacaattgctcaagcagatttatcgccagcagctccgaatagcgcccttccccttgcccggcgttaatgatttgcccaaacaggtcgctgaaatgcggctggtgcgcttcatccgggcgaaagaaccccgtattggcaaatattgacggccagttaagccattcatgccagtaggcgcgcggacgaaagtaaacccactggtgataccattcgcgagcctccggatgacgaccgtagtgatgaatctctcctggcgggaacagcaaaatatcacccggtcggcaaacaaattctcgtccctgatttttcaccaccccctgaccgcgaatggtgagattgagaatataacctttcattcccagcggtcggtcgataaaaaaatcgagataaccgttggcctcaatcggcgttaaacccgccaccagatgggcattaaacgagtatcccggcagcaggggatcattttgcgcttcagccatacttttcatactcccaccattcagagaagaaaccaattgtccatattgcatcagacattgccgtcactgcgtcttttactggctcttctcgctaacccaaccggtaaccccgcttattaaaagcattctgtaacaaagcgggaccaaagccatgacaaaaacgcgtaacaaaagtgtctataatcacggcagaaaagtccacattgattatttgcacggcgtcacactttgctatgccatagcatttttatccataagattagcggatcctacctgacgctttttatcgcaactctctactgtttctccatacccgttttacctgcaggtgcagttttattttgggagttacaccttggctaacattaagtctgctaagaagcgtgcaatccaagccgaaaagcgtcgtcagcacaacgctagccgtcgttcaatgactcgtacaagcatcaagaaagttatcgctgcaattgcaagcggtgacaaagaagcggcacaagctgcacttactgctgctactccagtacttgacagaatggctactaaaggcttgattcacaagaacaaagctgctcgtcataagagccgtctagctgcacaaatcaaagcactaggttaatctttacgacaacgagtttgaggcatttatggttactattcgtttacagcgtggtggcgcgaaaaagcgtccattttatcaactagtggtggctgatagccgtcgtgcaagaaacggtcgtttcattgaaaacatcggtttcttcaacccaactgcacaaggtcaagcggagcgtcttcgcgtagatctagagcgtgttgaatactgggttggtgtaggcgcgagcttatcagatcgcgtttctagcttggtaaaagaagcgaaaaaatctgcagcgtaagctgttatttattcgggtgaatttgaaaatgaaaacttttgttgctaagccagaaacggttcaacgtgactggtatgtggtagacgccacagacaaaactctaggccgtttggcttctgaaatcgcactacgccttcgtggtaagcacaagccagagtacacacctcacgtggacactggtgattacatcgtagtaatcaatgctgagaaagttgcggtaacaggccgtaaagcgcaagacaaaatgtactatgcgcactctggttacccaggtggtcttaaagagacaaactttgaaaaactaattgctcacaagccagaaatggttattgaaaaagcagttaaaggcatgttgccaaaaggccctctaggtcgcgcaatgttccgtaaaatgaaagtttacgcaggtgcagagcacaagcacaccgcacagcaaccacaagttttggacatttaaggagctatacttaattaacggcactcctcagccaagtcaaaagcctccggtcggaggcttttgactacatgcccatggcgtttacgccccgccctgccactcatcgcagtactgttgtaattcattaagcattctgccgacatggaagccatcacaaacggcatgatgaacctgaatcgccagcggcatcagcaccttgtcgccttgcgtataatatttgcccatagtgaaaacgggggcgaagaagttgtccatattggccacgtttaaatcaaaactggtgaaactcacccagggattggctgagacgaaaaacatattctcaataaaccctttagggaaataggccaggttttcaccgtaacacgccacatcttgcgaatatatgtgtagaaactgccggaaatcgtcgtggtattcactccagagcgatgaaaacgtttcagtttgctcatggaaaacggtgtaacaagggtgaacactatcccatatcaccagctcaccgtctttcattgccatacggaactccggatgagcattcatcaggcgggcaagaatgtgaataaaggccggataaaacttgtgcttatttttctttacggtctttaaaaaggccgtaatatccagctgaacggtctggttataggtacattgagcaactgactgaaatgcctcaaaatgttctttacgatgccattgggatatatcaacggtggtatatccagtgatttttttctccattttagcttccttagctcctgaaaatctcgataactcaaaaaatacgcccggtagtgatcttatttcattatggtgaaagttggaacctcttacgtgccaggccaaataggccgt

SEQ ID NO: 167 - DNA, 4836 bp, Artificial
  Synthetic
tcagatccttccgtatttagccagtatgttctctagtgtggttcgttgtttttgcgtgagccatgagaacgaaccattgagatcatgcttactttgcatgtcactcaaaaattttgcctcaaaactggtgagctgaatttttgcagttaaagcatcgtgtagtgtttttcttagtccgttacgtaggtaggaatctgatgtaatggttgttggtattttgtcaccattcatttttatctggttgttctcaagttcggttacgagatccatttgtctatctagttcaacttggaaaatcaacgtatcagtcgggcggcctcgcttatcaaccaccaatttcatattgctgtaagtgtttaaatctttacttattggtttcaaaacccattggttaagccttttaaactcatggtagttattttcaagcattaacatgaacttaaattcatcaaggctaatctctatatttgccttgtgagttttcttttgtgttagttcttttaataaccactcataaatcctcatagagtatttgttttcaaaagacttaacatgttccagattatattttatgaatttttttaactggaaaagataaggcaatatctcttcactaaaaactaattctaatttttcgcttgagaacttggcatagtttgtccactggaaaatcttaaagcctttaaccaaaggattcctgatttccacagttctcgtcatcagctctctggttgctttagctaatacaccataagcattttccctactgatgttcatcatctgagcgtattggttataagtgaacgataccgtccgttctttccttgtagggttttcaatcgtggggttgagtagtgccacacagcataaaattagcttggtttcatgctccgttaagtcatagcgactaatcgctagttcatttgctttgaaaacaactaattcagacatacatctcaattggtctaggtgattttaatcactataccaattgagatgggctagtcaatgataattactagtccttttcctttgagttgtgggtatctgtaaattctgctagacctttgctggaaaacttgtaaattctgctagaccctctgtaaattccgctagacctttgtgtgttttttttgtttatattcaagtggttataatttatagaataaagaaagaataaaaaaagataaaaagaatagatcccagccctgtgtataactcactactttagtcagttccgcagtattacaaaaggatgtcgcaaacgctgtttgctcctctacaaaacagaccttaaaaccctaaaggcttaagtagcaccctcgcaagctcgggcaaatcgctgaatattccttttgtctccgaccatcaggcacctgagtcgctgtctttttcgtgacattcagttcgctgcgctcacggctctggcagtgaatgggggtaaatggcactacaggcgccttttatggattcatgcaaggaaactacccataatacaagaaaagcccgtcacgggcttctcagggcgttttatggcgggtctgctatgtggtgctatctgactttttgctgttcagcagttcctgccctctgattttccagtctgaccacttcggattatcccgtgacaggtcattcagactggctaatgcacccagtaaggcagcggtatcatcaacaggcttacccgtcttactgtcaagaggacatccggtcaaataaaacgaaaggctcagtcgaaagactgggcctttcgttttgctgaggagacttagggaccctttatgacaacttgacggctacatcattcactttttcttcacaaccggcacggaactcgctcgggctggccccggtgcattttttaaatacccgcgagaaatagagttgatcgtcaaaaccaacattgcgaccgacggtggcgataggcatccgggtggtgctcaaaagcagcttcgcctggctgatacgttggtcctcgcgccagcttaagacgctaatccctaactgctggcggaaaagatgtgacagacgcgacggcgacaagcaaacatgctgtgcgacgctggcgatatcaaaattgctgtctgccaggtgatcgctgatgtactgacaagcctcgcgtacccgattatccatcggtggatggagcgactcgttaatcgcttccatgcgccgcagtaacaattgctcaagcagatttatcgccagcagctccgaatagcgcccttccccttgcccggcgttaatgatttgcccaaacaggtcgctgaaatgcggctggtgcgcttcatccgggcgaaagaaccccgtattggcaaatattgacggccagttaagccattcatgccagtaggcgcgcggacgaaagtaaacccactggtgataccattcgcgagcctccggatgacgaccgtagtgatgaatctctcctggcgggaacagcaaaatatcacccggtcggcaaacaaattctcgtccctgatttttcaccaccccctgaccgcgaatggtgagattgagaatataacctttcattcccagcggtcggtcgataaaaaaatcgagataaccgttggcctcaatcggcgttaaacccgccaccagatgggcattaaacgagtatcccggcagcaggggatcattttgcgcttcagccatacttttcatactcccaccattcagagaagaaaccaattgtccatattgcatcagacattgccgtcactgcgtcttttactggctcttctcgctaacccaaccggtaaccccgcttattaaaagcattctgtaacaaagcgggaccaaagccatgacaaaaacgcgtaacaaaagtgtctataatcacggcagaaaagtccacattgattatttgcacggcgtcacactttgctatgccatagcatttttatccataagattagcggatcctacctgacgctttttatcgcaactctctactgtttctccatacccgttttacctgcaggtgcagttttattttgggagttacaccttggctaacattaagtctgctaagaagcgtgcaatccaagccgaaaagcgtcgtcagcacaacgctagccgtcgttcaatgactcgtacaagcatcaagaaagttatcgctgcaattgcaagcggtgacaaagaagcggcacaagctgcacttactgctgctactccagtacttgacagaatggctactaaaggcttgattcacaagaacaaagctgctcgtcataagagccgtctagctgcacaaatcaaagcactaggttaatctttacgacaacgagtttgaggcatttatggttactattcgtttacagcgtggtggcgcgaaaaagcgtccattttatcaactagtggtggctgatagccgtcgtgcaagaaacggtcgtttcattgaaaacatcggtttcttcaacccaactgcacaaggtcaagcggagcgtcttcgcgtagatctagagcgtgttgaatactgggttggtgtaggcgcgagcttatcagatcgcgtttctagcttggtaaaagaagcgaaaaaatctgcagcgtaagctgttatacatttaaggagctattaacatggcagatactcaatactacggcacaggccgccgcaaaagttctactgctcgtgtgttcctacgtccaggcacaggtagcattaaagtaaaccaacgcgctcttgacgagtactttggtcgtgaaacagagtgcatggttgttcgtcagccacttgaacttgttgaaatgactgaaaagtttgacgtatacatcactgttaaaggtggtggttctaacggtcaagcgggtgcaatccgtcacggtcttactcgtgctcttatggagtatgatgaggcactacgtccagcacttcgtaaagctggcttcgttactcgtgacgcacgtcgcgttgaacgtaagaaagttggtctacacaaagcgcgtaagcgtccacaattctcaaagcgttaatttttacgacttaattaacggcactcctcagccaagtcaaaagcctccggtcggaggcttttgactacatgcccatggcgtttacgccccgccctgccactcatcgcagtactgttgtaattcattaagcattctgccgacatggaagccatcacaaacggcatgatgaacctgaatcgccagcggcatcagcaccttgtcgccttgcgtataatatttgcccatagtgaaaacgggggcgaagaagttgtccatattggccacgtttaaatcaaaactggtgaaactcacccagggattggctgagacgaaaaacatattctcaataaaccctttagggaaataggccaggttttcaccgtaacacgccacatcttgcgaatatatgtgtagaaactgccggaaatcgtcgtggtattcactccagagcgatgaaaacgtttcagtttgctcatggaaaacggtgtaacaagggtgaacactatcccatatcaccagctcaccgtctttcattgccatacggaactccggatgagcattcatcaggcgggcaagaatgtgaataaaggccggataaaacttgtgcttatttttctttacggtctttaaaaaggccgtaatatccagctgaacggtctggttataggtacattgagcaactgactgaaatgcctcaaaatgttctttacgatgccattgggatatatcaacggtggtatatccagtgatttttttctccattttagcttccttagctcctgaaaatctcgataactcaaaaaatacgcccggtagtgatcttatttcattatggtgaaagttggaacctcttacgtgccaggccaaataggccgt

SEQ ID NO: 168 - DNA, 4659 bp, Artificial
  Synthetic
tcagatccttccgtatttagccagtatgttctctagtgtggttcgttgtttttgcgtgagccatgagaacgaaccattgagatcatgcttactttgcatgtcactcaaaaattttgcctcaaaactggtgagctgaatttttgcagttaaagcatcgtgtagtgtttttcttagtccgttacgtaggtaggaatctgatgtaatggttgttggtattttgtcaccattcatttttatctggttgttctcaagttcggttacgagatccatttgtctatctagttcaacttggaaaatcaacgtatcagtcgggcggcctcgcttatcaaccaccaatttcatattgctgtaagtgtttaaatctttacttattggtttcaaaacccattggttaagccttttaaactcatggtagttattttcaagcattaacatgaacttaaattcatcaaggctaatctctatatttgccttgtgagttttcttttgtgttagttcttttaataaccactcataaatcctcatagagtatttgttttcaaaagacttaacatgttccagattatattttatgaatttttttaactggaaaagataaggcaatatctcttcactaaaaactaattctaatttttcgcttgagaacttggcatagtttgtccactggaaaatcttaaagcctttaaccaaaggattcctgatttccacagttctcgtcatcagctctctggttgctttagctaatacaccataagcattttccctactgatgttcatcatctgagcgtattggttataagtgaacgataccgtccgttctttccttgtagggttttcaatcgtggggttgagtagtgccacacagcataaaattagcttggtttcatgctccgttaagtcatagcgactaatcgctagttcatttgctttgaaaacaactaattcagacatacatctcaattggtctaggtgattttaatcactataccaattgagatgggctagtcaatgataattactagtccttttcctttgagttgtgggtatctgtaaattctgctagacctttgctggaaaacttgtaaattctgctagaccctctgtaaattccgctagacctttgtgtgttttttttgtttatattcaagtggttataatttatagaataaagaaagaataaaaaaagataaaaagaatagatcccagccctgtgtataactcactactttagtcagttccgcagtattacaaaaggatgtcgcaaacgctgtttgctcctctacaaaacagaccttaaaaccctaaaggcttaagtagcaccctcgcaagctcgggcaaatcgctgaatattccttttgtctccgaccatcaggcacctgagtcgctgtctttttcgtgacattcagttcgctgcgctcacggctctggcagtgaatgggggtaaatggcactacaggcgccttttatggattcatgcaaggaaactacccataatacaagaaaagcccgtcacgggcttctcagggcgttttatggcgggtctgctatgtggtgctatctgactttttgctgttcagcagttcctgccctctgattttccagtctgaccacttcggattatcccgtgacaggtcattcagactggctaatgcacccagtaaggcagcggtatcatcaacaggcttacccgtcttactgtcaagaggacatccggtcaaataaaacgaaaggctcagtcgaaagactgggcctttcgttttgctgaggagacttagggaccctttatgacaacttgacggctacatcattcactttttcttcacaaccggcacggaactcgctcgggctggccccggtgcattttttaaatacccgcgagaaatagagttgatcgtcaaaaccaacattgcgaccgacggtggcgataggcatccgggtggtgctcaaaagcagcttcgcctggctgatacgttggtcctcgcgccagcttaagacgctaatccctaactgctggcggaaaagatgtgacagacgcgacggcgacaagcaaacatgctgtgcgacgctggcgatatcaaaattgctgtctgccaggtgatcgctgatgtactgacaagcctcgcgtacccgattatccatcggtggatggagcgactcgttaatcgcttccatgcgccgcagtaacaattgctcaagcagatttatcgccagcagctccgaatagcgcccttccccttgcccggcgttaatgatttgcccaaacaggtcgctgaaatgcggctggtgcgcttcatccgggcgaaagaaccccgtattggcaaatattgacggccagttaagccattcatgccagtaggcgcgcggacgaaagtaaacccactggtgataccattcgcgagcctccggatgacgaccgtagtgatgaatctctcctggcgggaacagcaaaatatcacccggtcggcaaacaaattctcgtccctgatttttcaccaccccctgaccgcgaatggtgagattgagaatataacctttcattcccagcggtcggtcgataaaaaaatcgagataaccgttggcctcaatcggcgttaaacccgccaccagatgggcattaaacgagtatcccggcagcaggggatcattttgcgcttcagccatacttttcatactcccaccattcagagaagaaaccaattgtccatattgcatcagacattgccgtcactgcgtcttttactggctcttctcgctaacccaaccggtaaccccgcttattaaaagcattctgtaacaaagcgggaccaaagccatgacaaaaacgcgtaacaaaagtgtctataatcacggcagaaaagtccacattgattatttgcacggcgtcacactttgctatgccatagcatttttatccataagattagcggatcctacctgacgctttttatcgcaactctctactgtttctccatacccgttttacctgcaggtgcagttttattttgggagttacaccttggctaacattaagtctgctaagaagcgtgcaatccaagccgaaaagcgtcgtcagcacaacgctagccgtcgttcaatgactcgtacaagcatcaagaaagttatcgctgcaattgcaagcggtgacaaagaagcggcacaagctgcacttactgctgctactccagtacttgacagaatggctactaaaggcttgattcacaagaacaaagctgctcgtcataagagccgtctagctgcacaaatcaaagcactaggttaatctttacgacaacgagtttgaggcatttatggttactattcgtttacagcgtggtggcgcgaaaaagcgtccattttatcaactagtggtggctgatagccgtcgtgcaagaaacggtcgtttcattgaaaacatcggtttcttcaacccaactgcacaaggtcaagcggagcgtcttcgcgtagatctagagcgtgttgaatactgggttggtgtaggcgcgagcttatcagatcgcgtttctagcttggtaaaagaagcgaaaaaatctgcagcgtaagctgttatagttctgaggtgagtgtttaatgcctatcgttaaagttagagaaaacgagccgtttgatgtggcgctgcgtcgttttaagcgttcttgtgaaaaagcaggtgttctttctgaagttcgtcgtcgtgaattcttcgaaaagccaacttgggaacgcaagcgcaagaaagctgccgctaagaagcgtcatcttaagaagctagctcgtgaaaacgcacgtcgcgtaaaactctactaatatagggtacttaattaacggcactcctcagccaagtcaaaagcctccggtcggaggcttttgactacatgcccatggcgtttacgccccgccctgccactcatcgcagtactgttgtaattcattaagcattctgccgacatggaagccatcacaaacggcatgatgaacctgaatcgccagcggcatcagcaccttgtcgccttgcgtataatatttgcccatagtgaaaacgggggcgaagaagttgtccatattggccacgtttaaatcaaaactggtgaaactcacccagggattggctgagacgaaaaacatattctcaataaaccctttagggaaataggccaggttttcaccgtaacacgccacatcttgcgaatatatgtgtagaaactgccggaaatcgtcgtggtattcactccagagcgatgaaaacgtttcagtttgctcatggaaaacggtgtaacaagggtgaacactatcccatatcaccagctcaccgtctttcattgccatacggaactccggatgagcattcatcaggcgggcaagaatgtgaataaaggccggataaaacttgtgcttatttttctttacggtctttaaaaaggccgtaatatccagctgaacggtctggttataggtacattgagcaactgactgaaatgcctcaaaatgttctttacgatgccattgggatatatcaacggtggtatatccagtgatttttttctccattttagcttccttagctcctgaaaatctcgataactcaaaaaatacgcccggtagtgatcttatttcattatggtgaaagttggaacctcttacgtgccaggccaaataggccgt

SEQ ID NO: 169 - DNA, 4231 bp, Artificial
  Synthetic
tcagatccttccgtatttagccagtatgttctctagtgtggttcgttgtttttgcgtgagccatgagaacgaaccattgagatcatgcttactttgcatgtcactcaaaaattttgcctcaaaactggtgagctgaatttttgcagttaaagcatcgtgtagtgtttttcttagtccgttacgtaggtaggaatctgatgtaatggttgttggtattttgtcaccattcatttttatctggttgttctcaagttcggttacgagatccatttgtctatctagttcaacttggaaaatcaacgtatcagtcgggcggcctcgcttatcaaccaccaatttcatattgctgtaagtgtttaaatctttacttattggtttcaaaacccattggttaagccttttaaactcatggtagttattttcaagcattaacatgaacttaaattcatcaaggctaatctctatatttgccttgtgagttttcttttgtgttagttcttttaataaccactcataaatcctcatagagtatttgttttcaaaagacttaacatgttccagattatattttatgaatttttttaactggaaaagataaggcaatatctcttcactaaaaactaattctaatttttcgcttgagaacttggcatagtttgtccactggaaaatcttaaagcctttaaccaaaggattcctgatttccacagttctcgtcatcagctctctggttgctttagctaatacaccataagcattttccctactgatgttcatcatctgagcgtattggttataagtgaacgataccgtccgttctttccttgtagggttttcaatcgtggggttgagtagtgccacacagcataaaattagcttggtttcatgctccgttaagtcatagcgactaatcgctagttcatttgctttgaaaacaactaattcagacatacatctcaattggtctaggtgattttaatcactataccaattgagatgggctagtcaatgataattactagtccttttcctttgagttgtgggtatctgtaaattctgctagacctttgctggaaaacttgtaaattctgctagaccctctgtaaattccgctagacctttgtgtgttttttttgtttatattcaagtggttataatttatagaataaagaaagaataaaaaaagataaaaagaatagatcccagccctgtgtataactcactactttagtcagttccgcagtattacaaaaggatgtcgcaaacgctgtttgctcctctacaaaacagaccttaaaaccctaaaggcttaagtagcaccctcgcaagctcgggcaaatcgctgaatattccttttgtctccgaccatcaggcacctgagtcgctgtctttttcgtgacattcagttcgctgcgctcacggctctggcagtgaatgggggtaaatggcactacaggcgccttttatggattcatgcaaggaaactacccataatacaagaaaagcccgtcacgggcttctcagggcgttttatggcgggtctgctatgtggtgctatctgactttttgctgttcagcagttcctgccctctgattttccagtctgaccacttcggattatcccgtgacaggtcattcagactggctaatgcacccagtaaggcagcggtatcatcaacaggcttacccgtcttactgtcaagaggacatccggtcaaataaaacgaaaggctcagtcgaaagactgggcctttcgttttgctgaggagacttagggaccctttatgacaacttgacggctacatcattcactttttcttcacaaccggcacggaactcgctcgggctggccccggtgcattttttaaatacccgcgagaaatagagttgatcgtcaaaaccaacattgcgaccgacggtggcgataggcatccgggtggtgctcaaaagcagcttcgcctggctgatacgttggtcctcgcgccagcttaagacgctaatccctaactgctggcggaaaagatgtgacagacgcgacggcgacaagcaaacatgctgtgcgacgctggcgatatcaaaattgctgtctgccaggtgatcgctgatgtactgacaagcctcgcgtacccgattatccatcggtggatggagcgactcgttaatcgcttccatgcgccgcagtaacaattgctcaagcagatttatcgccagcagctccgaatagcgcccttccccttgcccggcgttaatgatttgcccaaacaggtcgctgaaatgcggctggtgcgcttcatccgggcgaaagaaccccgtattggcaaatattgacggccagttaagccattcatgccagtaggcgcgcggacgaaagtaaacccactggtgataccattcgcgagcctccggatgacgaccgtagtgatgaatctctcctggcgggaacagcaaaatatcacccggtcggcaaacaaattctcgtccctgatttttcaccaccccctgaccgcgaatggtgagattgagaatataacctttcattcccagcggtcggtcgataaaaaaatcgagataaccgttggcctcaatcggcgttaaacccgccaccagatgggcattaaacgagtatcccggcagcaggggatcattttgcgcttcagccatacttttcatactcccaccattcagagaagaaaccaattgtccatattgcatcagacattgccgtcactgcgtcttttactggctcttctcgctaacccaaccggtaaccccgcttattaaaagcattctgtaacaaagcgggaccaaagccatgacaaaaacgcgtaacaaaagtgtctataatcacggcagaaaagtccacattgattatttgcacggcgtcacactttgctatgccatagcatttttatccataagattagcggatcctacctgacgctttttatcgcaactctctactgtttctccatacccgttttacctgcaggtgcagtaactaggacgagaggatatgatgagcaaagtcagtcaagatatcatcaaaaaaatcgaagaagcacagctaaagactgatgttcctgcgtttggtccaggtgacacagtagttgttaaagttcgcgttaccgaaggtgacaaagagcgtcttcaggcttatgaaggtgttgttatcgctaaacgtaaccgtggtctgcactcgtcttttaccgtgcgtaaaatttctagcggcgaaggcgttgagcgtgtgttccaaacacacagcccggcagtttcttcaattgaagtgaaacgtcgcggtgcggttcgtcgtgctaagctttactatctacgtgagcgttcaggtaaatctgcacgtatcaaagagaagcttaactaagattactaacttaattaacggcactcctcagccaagtcaaaagcctccggtcggaggcttttgactacatgcccatggcgtttacgccccgccctgccactcatcgcagtactgttgtaattcattaagcattctgccgacatggaagccatcacaaacggcatgatgaacctgaatcgccagcggcatcagcaccttgtcgccttgcgtataatatttgcccatagtgaaaacgggggcgaagaagttgtccatattggccacgtttaaatcaaaactggtgaaactcacccagggattggctgagacgaaaaacatattctcaataaaccctttagggaaataggccaggttttcaccgtaacacgccacatcttgcgaatatatgtgtagaaactgccggaaatcgtcgtggtattcactccagagcgatgaaaacgtttcagtttgctcatggaaaacggtgtaacaagggtgaacactatcccatatcaccagctcaccgtctttcattgccatacggaactccggatgagcattcatcaggcgggcaagaatgtgaataaaggccggataaaacttgtgcttatttttctttacggtctttaaaaaggccgtaatatccagctgaacggtctggttataggtacattgagcaactgactgaaatgcctcaaaatgttctttacgatgccattgggatatatcaacggtggtatatccagtgatttttttctccattttagcttccttagctcctgaaaatctcgataactcaaaaaatacgcccggtagtgatcttatttcattatggtgaaagttggaacctcttacgtgccaggccaaataggccgt

SEQ ID NO: 170 - DNA, 4069 bp, Artificial
  Synthetic
tcagatccttccgtatttagccagtatgttctctagtgtggttcgttgtttttgcgtgagccatgagaacgaaccattgagatcatgcttactttgcatgtcactcaaaaattttgcctcaaaactggtgagctgaatttttgcagttaaagcatcgtgtagtgtttttcttagtccgttacgtaggtaggaatctgatgtaatggttgttggtattttgtcaccattcatttttatctggttgttctcaagttcggttacgagatccatttgtctatctagttcaacttggaaaatcaacgtatcagtcgggcggcctcgcttatcaaccaccaatttcatattgctgtaagtgtttaaatctttacttattggtttcaaaacccattggttaagccttttaaactcatggtagttattttcaagcattaacatgaacttaaattcatcaaggctaatctctatatttgccttgtgagttttcttttgtgttagttcttttaataaccactcataaatcctcatagagtatttgttttcaaaagacttaacatgttccagattatattttatgaatttttttaactggaaaagataaggcaatatctcttcactaaaaactaattctaatttttcgcttgagaacttggcatagtttgtccactggaaaatcttaaagcctttaaccaaaggattcctgatttccacagttctcgtcatcagctctctggttgctttagctaatacaccataagcattttccctactgatgttcatcatctgagcgtattggttataagtgaacgataccgtccgttctttccttgtagggttttcaatcgtggggttgagtagtgccacacagcataaaattagcttggtttcatgctccgttaagtcatagcgactaatcgctagttcatttgctttgaaaacaactaattcagacatacatctcaattggtctaggtgattttaatcactataccaattgagatgggctagtcaatgataattactagtccttttcctttgagttgtgggtatctgtaaattctgctagacctttgctggaaaacttgtaaattctgctagaccctctgtaaattccgctagacctttgtgtgttttttttgtttatattcaagtggttataatttatagaataaagaaagaataaaaaaagataaaaagaatagatcccagccctgtgtataactcactactttagtcagttccgcagtattacaaaaggatgtcgcaaacgctgtttgctcctctacaaaacagaccttaaaaccctaaaggcttaagtagcaccctcgcaagctcgggcaaatcgctgaatattccttttgtctccgaccatcaggcacctgagtcgctgtctttttcgtgacattcagttcgctgcgctcacggctctggcagtgaatgggggtaaatggcactacaggcgccttttatggattcatgcaaggaaactacccataatacaagaaaagcccgtcacgggcttctcagggcgttttatggcgggtctgctatgtggtgctatctgactttttgctgttcagcagttcctgccctctgattttccagtctgaccacttcggattatcccgtgacaggtcattcagactggctaatgcacccagtaaggcagcggtatcatcaacaggcttacccgtcttactgtcaagaggacatccggtcaaataaaacgaaaggctcagtcgaaagactgggcctttcgttttgctgaggagacttagggaccctttatgacaacttgacggctacatcattcactttttcttcacaaccggcacggaactcgctcgggctggccccggtgcattttttaaatacccgcgagaaatagagttgatcgtcaaaaccaacattgcgaccgacggtggcgataggcatccgggtggtgctcaaaagcagcttcgcctggctgatacgttggtcctcgcgccagcttaagacgctaatccctaactgctggcggaaaagatgtgacagacgcgacggcgacaagcaaacatgctgtgcgacgctggcgatatcaaaattgctgtctgccaggtgatcgctgatgtactgacaagcctcgcgtacccgattatccatcggtggatggagcgactcgttaatcgcttccatgcgccgcagtaacaattgctcaagcagatttatcgccagcagctccgaatagcgcccttccccttgcccggcgttaatgatttgcccaaacaggtcgctgaaatgcggctggtgcgcttcatccgggcgaaagaaccccgtattggcaaatattgacggccagttaagccattcatgccagtaggcgcgcggacgaaagtaaacccactggtgataccattcgcgagcctccggatgacgaccgtagtgatgaatctctcctggcgggaacagcaaaatatcacccggtcggcaaacaaattctcgtccctgatttttcaccaccccctgaccgcgaatggtgagattgagaatataacctttcattcccagcggtcggtcgataaaaaaatcgagataaccgttggcctcaatcggcgttaaacccgccaccagatgggcattaaacgagtatcccggcagcaggggatcattttgcgcttcagccatacttttcatactcccaccattcagagaagaaaccaattgtccatattgcatcagacattgccgtcactgcgtcttttactggctcttctcgctaacccaaccggtaaccccgcttattaaaagcattctgtaacaaagcgggaccaaagccatgacaaaaacgcgtaacaaaagtgtctataatcacggcagaaaagtccacattgattatttgcacggcgtcacactttgctatgccatagcatttttatccataagattagcggatcctacctgacgctttttatcgcaactctctactgtttctccatacccgttttacctgcaggtgcagtaagaatgcggagttttagcaatgcctaaaatgaaaactgtaagcggtgccgccaaacgttttaagaaaacgggttctggccgctttaaaagcaaacagtctcacttacgtcacattctgactaagaagagctctaagcgtaaacgtcaccttcgtggcaaaaaactggttcatgactctgataccaaattggttcagcgcatgttgccttacgtataagacttaggacttaattaacggcactcctcagccaagtcaaaagcctccggtcggaggcttttgactacatgcccatggcgtttacgccccgccctgccactcatcgcagtactgttgtaattcattaagcattctgccgacatggaagccatcacaaacggcatgatgaacctgaatcgccagcggcatcagcaccttgtcgccttgcgtataatatttgcccatagtgaaaacgggggcgaagaagttgtccatattggccacgtttaaatcaaaactggtgaaactcacccagggattggctgagacgaaaaacatattctcaataaaccctttagggaaataggccaggttttcaccgtaacacgccacatcttgcgaatatatgtgtagaaactgccggaaatcgtcgtggtattcactccagagcgatgaaaacgtttcagtttgctcatggaaaacggtgtaacaagggtgaacactatcccatatcaccagctcaccgtctttcattgccatacggaactccggatgagcattcatcaggcgggcaagaatgtgaataaaggccggataaaacttgtgcttatttttctttacggtctttaaaaaggccgtaatatccagctgaacggtctggttataggtacattgagcaactgactgaaatgcctcaaaatgttctttacgatgccattgggatatatcaacggtggtatatccagtgatttttttctccattttagcttccttagctcctgaaaatctcgataactcaaaaaatacgcccggtagtgatcttatttcattatggtgaaagttggaacctcttacgtgccaggccaaataggccgt

SEQ ID NO: 171 - DNA, 4228 bp, Artificial
  Synthetic
tcagatccttccgtatttagccagtatgttctctagtgtggttcgttgtttttgcgtgagccatgagaacgaaccattgagatcatgcttactttgcatgtcactcaaaaattttgcctcaaaactggtgagctgaatttttgcagttaaagcatcgtgtagtgtttttcttagtccgttacgtaggtaggaatctgatgtaatggttgttggtattttgtcaccattcatttttatctggttgttctcaagttcggttacgagatccatttgtctatctagttcaacttggaaaatcaacgtatcagtcgggcggcctcgcttatcaaccaccaatttcatattgctgtaagtgtttaaatctttacttattggtttcaaaacccattggttaagccttttaaactcatggtagttattttcaagcattaacatgaacttaaattcatcaaggctaatctctatatttgccttgtgagttttcttttgtgttagttcttttaataaccactcataaatcctcatagagtatttgttttcaaaagacttaacatgttccagattatattttatgaatttttttaactggaaaagataaggcaatatctcttcactaaaaactaattctaatttttcgcttgagaacttggcatagtttgtccactggaaaatcttaaagcctttaaccaaaggattcctgatttccacagttctcgtcatcagctctctggttgctttagctaatacaccataagcattttccctactgatgttcatcatctgagcgtattggttataagtgaacgataccgtccgttctttccttgtagggttttcaatcgtggggttgagtagtgccacacagcataaaattagcttggtttcatgctccgttaagtcatagcgactaatcgctagttcatttgctttgaaaacaactaattcagacatacatctcaattggtctaggtgattttaatcactataccaattgagatgggctagtcaatgataattactagtccttttcctttgagttgtgggtatctgtaaattctgctagacctttgctggaaaacttgtaaattctgctagaccctctgtaaattccgctagacctttgtgtgttttttttgtttatattcaagtggttataatttatagaataaagaaagaataaaaaaagataaaaagaatagatcccagccctgtgtataactcactactttagtcagttccgcagtattacaaaaggatgtcgcaaacgctgtttgctcctctacaaaacagaccttaaaaccctaaaggcttaagtagcaccctcgcaagctcgggcaaatcgctgaatattccttttgtctccgaccatcaggcacctgagtcgctgtctttttcgtgacattcagttcgctgcgctcacggctctggcagtgaatgggggtaaatggcactacaggcgccttttatggattcatgcaaggaaactacccataatacaagaaaagcccgtcacgggcttctcagggcgttttatggcgggtctgctatgtggtgctatctgactttttgctgttcagcagttcctgccctctgattttccagtctgaccacttcggattatcccgtgacaggtcattcagactggctaatgcacccagtaaggcagcggtatcatcaacaggcttacccgtcttactgtcaagaggacatccggtcaaataaaacgaaaggctcagtcgaaagactgggcctttcgttttgctgaggagacttagggaccctttatgacaacttgacggctacatcattcactttttcttcacaaccggcacggaactcgctcgggctggccccggtgcattttttaaatacccgcgagaaatagagttgatcgtcaaaaccaacattgcgaccgacggtggcgataggcatccgggtggtgctcaaaagcagcttcgcctggctgatacgttggtcctcgcgccagcttaagacgctaatccctaactgctggcggaaaagatgtgacagacgcgacggcgacaagcaaacatgctgtgcgacgctggcgatatcaaaattgctgtctgccaggtgatcgctgatgtactgacaagcctcgcgtacccgattatccatcggtggatggagcgactcgttaatcgcttccatgcgccgcagtaacaattgctcaagcagatttatcgccagcagctccgaatagcgcccttccccttgcccggcgttaatgatttgcccaaacaggtcgctgaaatgcggctggtgcgcttcatccgggcgaaagaaccccgtattggcaaatattgacggccagttaagccattcatgccagtaggcgcgcggacgaaagtaaacccactggtgataccattcgcgagcctccggatgacgaccgtagtgatgaatctctcctggcgggaacagcaaaatatcacccggtcggcaaacaaattctcgtccctgatttttcaccaccccctgaccgcgaatggtgagattgagaatataacctttcattcccagcggtcggtcgataaaaaaatcgagataaccgttggcctcaatcggcgttaaacccgccaccagatgggcattaaacgagtatcccggcagcaggggatcattttgcgcttcagccatacttttcatactcccaccattcagagaagaaaccaattgtccatattgcatcagacattgccgtcactgcgtcttttactggctcttctcgctaacccaaccggtaaccccgcttattaaaagcattctgtaacaaagcgggaccaaagccatgacaaaaacgcgtaacaaaagtgtctataatcacggcagaaaagtccacattgattatttgcacggcgtcacactttgctatgccatagcatttttatccataagattagcggatcctacctgacgctttttatcgcaactctctactgtttctccatacccgttttacctgcaggtgcagtaagacttaggagactgattaatggctagagtaaaacgcggcactatcgcacgtgctcgtcacaaaaaagtcctcaagcaggcaaaaggttattacggcgcacgttcacgtgtatatcgcgtagcggtacaagctgtaactaaagctggtcaatatgcttaccgtgaccgtcgtcagcgcaagcgtcaattccgtcaactatggattgcacgtattaacgctgctgctcgtcaaaatggtatgtcatacagccgtttcatcaacggtttgaagaaagcgtctgttgaaatcgatcgtaagatccttgccgacatcgcagtacatgacaaagcagctttcagcgcactagtcgaagcggctaaaggcgcattagcttaattattaacacttaattaacggcactcctcagccaagtcaaaagcctccggtcggaggcttttgactacatgcccatggcgtttacgccccgccctgccactcatcgcagtactgttgtaattcattaagcattctgccgacatggaagccatcacaaacggcatgatgaacctgaatcgccagcggcatcagcaccttgtcgccttgcgtataatatttgcccatagtgaaaacgggggcgaagaagttgtccatattggccacgtttaaatcaaaactggtgaaactcacccagggattggctgagacgaaaaacatattctcaataaaccctttagggaaataggccaggttttcaccgtaacacgccacatcttgcgaatatatgtgtagaaactgccggaaatcgtcgtggtattcactccagagcgatgaaaacgtttcagtttgctcatggaaaacggtgtaacaagggtgaacactatcccatatcaccagctcaccgtctttcattgccatacggaactccggatgagcattcatcaggcgggcaagaatgtgaataaaggccggataaaacttgtgcttatttttctttacggtctttaaaaaggccgtaatatccagctgaacggtctggttataggtacattgagcaactgactgaaatgcctcaaaatgttctttacgatgccattgggatatatcaacggtggtatatccagtgatttttttctccattttagcttccttagctcctgaaaatctcgataactcaaaaaatacgcccggtagtgatcttatttcattatggtgaaagttggaacctcttacgtgccaggccaaataggccgt

SEQ ID NO: 172 - DNA, 4183 bp, Artificial
  Synthetic
tcagatccttccgtatttagccagtatgttctctagtgtggttcgttgtttttgcgtgagccatgagaacgaaccattgagatcatgcttactttgcatgtcactcaaaaattttgcctcaaaactggtgagctgaatttttgcagttaaagcatcgtgtagtgtttttcttagtccgttacgtaggtaggaatctgatgtaatggttgttggtattttgtcaccattcatttttatctggttgttctcaagttcggttacgagatccatttgtctatctagttcaacttggaaaatcaacgtatcagtcgggcggcctcgcttatcaaccaccaatttcatattgctgtaagtgtttaaatctttacttattggtttcaaaacccattggttaagccttttaaactcatggtagttattttcaagcattaacatgaacttaaattcatcaaggctaatctctatatttgccttgtgagttttcttttgtgttagttcttttaataaccactcataaatcctcatagagtatttgttttcaaaagacttaacatgttccagattatattttatgaatttttttaactggaaaagataaggcaatatctcttcactaaaaactaattctaatttttcgcttgagaacttggcatagtttgtccactggaaaatcttaaagcctttaaccaaaggattcctgatttccacagttctcgtcatcagctctctggttgctttagctaatacaccataagcattttccctactgatgttcatcatctgagcgtattggttataagtgaacgataccgtccgttctttccttgtagggttttcaatcgtggggttgagtagtgccacacagcataaaattagcttggtttcatgctccgttaagtcatagcgactaatcgctagttcatttgctttgaaaacaactaattcagacatacatctcaattggtctaggtgattttaatcactataccaattgagatgggctagtcaatgataattactagtccttttcctttgagttgtgggtatctgtaaattctgctagacctttgctggaaaacttgtaaattctgctagaccctctgtaaattccgctagacctttgtgtgttttttttgtttatattcaagtggttataatttatagaataaagaaagaataaaaaaagataaaaagaatagatcccagccctgtgtataactcactactttagtcagttccgcagtattacaaaaggatgtcgcaaacgctgtttgctcctctacaaaacagaccttaaaaccctaaaggcttaagtagcaccctcgcaagctcgggcaaatcgctgaatattccttttgtctccgaccatcaggcacctgagtcgctgtctttttcgtgacattcagttcgctgcgctcacggctctggcagtgaatgggggtaaatggcactacaggcgccttttatggattcatgcaaggaaactacccataatacaagaaaagcccgtcacgggcttctcagggcgttttatggcgggtctgctatgtggtgctatctgactttttgctgttcagcagttcctgccctctgattttccagtctgaccacttcggattatcccgtgacaggtcattcagactggctaatgcacccagtaaggcagcggtatcatcaacaggcttacccgtcttactgtcaagaggacatccggtcaaataaaacgaaaggctcagtcgaaagactgggcctttcgttttgctgaggagacttagggaccctttatgacaacttgacggctacatcattcactttttcttcacaaccggcacggaactcgctcgggctggccccggtgcattttttaaatacccgcgagaaatagagttgatcgtcaaaaccaacattgcgaccgacggtggcgataggcatccgggtggtgctcaaaagcagcttcgcctggctgatacgttggtcctcgcgccagcttaagacgctaatccctaactgctggcggaaaagatgtgacagacgcgacggcgacaagcaaacatgctgtgcgacgctggcgatatcaaaattgctgtctgccaggtgatcgctgatgtactgacaagcctcgcgtacccgattatccatcggtggatggagcgactcgttaatcgcttccatgcgccgcagtaacaattgctcaagcagatttatcgccagcagctccgaatagcgcccttccccttgcccggcgttaatgatttgcccaaacaggtcgctgaaatgcggctggtgcgcttcatccgggcgaaagaaccccgtattggcaaatattgacggccagttaagccattcatgccagtaggcgcgcggacgaaagtaaacccactggtgataccattcgcgagcctccggatgacgaccgtagtgatgaatctctcctggcgggaacagcaaaatatcacccggtcggcaaacaaattctcgtccctgatttttcaccaccccctgaccgcgaatggtgagattgagaatataacctttcattcccagcggtcggtcgataaaaaaatcgagataaccgttggcctcaatcggcgttaaacccgccaccagatgggcattaaacgagtatcccggcagcaggggatcattttgcgcttcagccatacttttcatactcccaccattcagagaagaaaccaattgtccatattgcatcagacattgccgtcactgcgtcttttactggctcttctcgctaacccaaccggtaaccccgcttattaaaagcattctgtaacaaagcgggaccaaagccatgacaaaaacgcgtaacaaaagtgtctataatcacggcagaaaagtccacattgattatttgcacggcgtcacactttgctatgccatagcatttttatccataagattagcggatcctacctgacgctttttatcgcaactctctactgtttctccatacccgttttacctgcaggtgcagtgaggcagagcggagttaactatgtacgcggttttccaaagtggcggtaaacaacaccgtgtggccgaaggccaaaccgttcgtcttgaaaaaatcgaagtagccccaggcgaaacggttgaatttgacaaagttttaatggtaagcaacggtgacgacgtaaaaatcggcacaccaatcgttgctggtggtaaggtgactgctgaggttgttacacacggtcgtggcgataaagtaaaaatcgttaagttccgtcgtcgtaagcactctcgtaagcaagcgggtcaccgtcagtggttcacagaagtgaaaatcactggtatcaacgcataataggagcaacttaattaacggcactcctcagccaagtcaaaagcctccggtcggaggcttttgactacatgcccatggcgtttacgccccgccctgccactcatcgcagtactgttgtaattcattaagcattctgccgacatggaagccatcacaaacggcatgatgaacctgaatcgccagcggcatcagcaccttgtcgccttgcgtataatatttgcccatagtgaaaacgggggcgaagaagttgtccatattggccacgtttaaatcaaaactggtgaaactcacccagggattggctgagacgaaaaacatattctcaataaaccctttagggaaataggccaggttttcaccgtaacacgccacatcttgcgaatatatgtgtagaaactgccggaaatcgtcgtggtattcactccagagcgatgaaaacgtttcagtttgctcatggaaaacggtgtaacaagggtgaacactatcccatatcaccagctcaccgtctttcattgccatacggaactccggatgagcattcatcaggcgggcaagaatgtgaataaaggccggataaaacttgtgcttatttttctttacggtctttaaaaaggccgtaatatccagctgaacggtctggttataggtacattgagcaactgactgaaatgcctcaaaatgttctttacgatgccattgggatatatcaacggtggtatatccagtgatttttttctccattttagcttccttagctcctgaaaatctcgataactcaaaaaatacgcccggtagtgatcttatttcattatggtgaaagttggaacctcttacgtgccaggccaaataggccgt

SEQ ID NO: 173 - DNA, 4129 bp, Artificial
  Synthetic
tcagatccttccgtatttagccagtatgttctctagtgtggttcgttgtttttgcgtgagccatgagaacgaaccattgagatcatgcttactttgcatgtcactcaaaaattttgcctcaaaactggtgagctgaatttttgcagttaaagcatcgtgtagtgtttttcttagtccgttacgtaggtaggaatctgatgtaatggttgttggtattttgtcaccattcatttttatctggttgttctcaagttcggttacgagatccatttgtctatctagttcaacttggaaaatcaacgtatcagtcgggcggcctcgcttatcaaccaccaatttcatattgctgtaagtgtttaaatctttacttattggtttcaaaacccattggttaagccttttaaactcatggtagttattttcaagcattaacatgaacttaaattcatcaaggctaatctctatatttgccttgtgagttttcttttgtgttagttcttttaataaccactcataaatcctcatagagtatttgttttcaaaagacttaacatgttccagattatattttatgaatttttttaactggaaaagataaggcaatatctcttcactaaaaactaattctaatttttcgcttgagaacttggcatagtttgtccactggaaaatcttaaagcctttaaccaaaggattcctgatttccacagttctcgtcatcagctctctggttgctttagctaatacaccataagcattttccctactgatgttcatcatctgagcgtattggttataagtgaacgataccgtccgttctttccttgtagggttttcaatcgtggggttgagtagtgccacacagcataaaattagcttggtttcatgctccgttaagtcatagcgactaatcgctagttcatttgctttgaaaacaactaattcagacatacatctcaattggtctaggtgattttaatcactataccaattgagatgggctagtcaatgataattactagtccttttcctttgagttgtgggtatctgtaaattctgctagacctttgctggaaaacttgtaaattctgctagaccctctgtaaattccgctagacctttgtgtgttttttttgtttatattcaagtggttataatttatagaataaagaaagaataaaaaaagataaaaagaatagatcccagccctgtgtataactcactactttagtcagttccgcagtattacaaaaggatgtcgcaaacgctgtttgctcctctacaaaacagaccttaaaaccctaaaggcttaagtagcaccctcgcaagctcgggcaaatcgctgaatattccttttgtctccgaccatcaggcacctgagtcgctgtctttttcgtgacattcagttcgctgcgctcacggctctggcagtgaatgggggtaaatggcactacaggcgccttttatggattcatgcaaggaaactacccataatacaagaaaagcccgtcacgggcttctcagggcgttttatggcgggtctgctatgtggtgctatctgactttttgctgttcagcagttcctgccctctgattttccagtctgaccacttcggattatcccgtgacaggtcattcagactggctaatgcacccagtaaggcagcggtatcatcaacaggcttacccgtcttactgtcaagaggacatccggtcaaataaaacgaaaggctcagtcgaaagactgggcctttcgttttgctgaggagacttagggaccctttatgacaacttgacggctacatcattcactttttcttcacaaccggcacggaactcgctcgggctggccccggtgcattttttaaatacccgcgagaaatagagttgatcgtcaaaaccaacattgcgaccgacggtggcgataggcatccgggtggtgctcaaaagcagcttcgcctggctgatacgttggtcctcgcgccagcttaagacgctaatccctaactgctggcggaaaagatgtgacagacgcgacggcgacaagcaaacatgctgtgcgacgctggcgatatcaaaattgctgtctgccaggtgatcgctgatgtactgacaagcctcgcgtacccgattatccatcggtggatggagcgactcgttaatcgcttccatgcgccgcagtaacaattgctcaagcagatttatcgccagcagctccgaatagcgcccttccccttgcccggcgttaatgatttgcccaaacaggtcgctgaaatgcggctggtgcgcttcatccgggcgaaagaaccccgtattggcaaatattgacggccagttaagccattcatgccagtaggcgcgcggacgaaagtaaacccactggtgataccattcgcgagcctccggatgacgaccgtagtgatgaatctctcctggcgggaacagcaaaatatcacccggtcggcaaacaaattctcgtccctgatttttcaccaccccctgaccgcgaatggtgagattgagaatataacctttcattcccagcggtcggtcgataaaaaaatcgagataaccgttggcctcaatcggcgttaaacccgccaccagatgggcattaaacgagtatcccggcagcaggggatcattttgcgcttcagccatacttttcatactcccaccattcagagaagaaaccaattgtccatattgcatcagacattgccgtcactgcgtcttttactggctcttctcgctaacccaaccggtaaccccgcttattaaaagcattctgtaacaaagcgggaccaaagccatgacaaaaacgcgtaacaaaagtgtctataatcacggcagaaaagtccacattgattatttgcacggcgtcacactttgctatgccatagcatttttatccataagattagcggatcctacctgacgctttttatcgcaactctctactgtttctccatacccgttttacctgcaggtgcagtcataataggagcacgaacacatggcacacaaaaaagctggtggtagtaccaaaaacggtcgtgattcagaaagtaaacgcctaggtgttaagcgctttggtggtgaatctgttcttgctggtaacatcattgttcgtcaacgtggtactcgtttccacgctggtgacaacatgggtatcggtaaagaccacacgttgtttgcactaaaagacggtaaagttcagttcgacgttaaaggaccgaagaaccgtaaatttgtaagcatcgtagctgagtaagcgcgtaaacttaattaacggcactcctcagccaagtcaaaagcctccggtcggaggcttttgactacatgcccatggcgtttacgccccgccctgccactcatcgcagtactgttgtaattcattaagcattctgccgacatggaagccatcacaaacggcatgatgaacctgaatcgccagcggcatcagcaccttgtcgccttgcgtataatatttgcccatagtgaaaacgggggcgaagaagttgtccatattggccacgtttaaatcaaaactggtgaaactcacccagggattggctgagacgaaaaacatattctcaataaaccctttagggaaataggccaggttttcaccgtaacacgccacatcttgcgaatatatgtgtagaaactgccggaaatcgtcgtggtattcactccagagcgatgaaaacgtttcagtttgctcatggaaaacggtgtaacaagggtgaacactatcccatatcaccagctcaccgtctttcattgccatacggaactccggatgagcattcatcaggcgggcaagaatgtgaataaaggccggataaaacttgtgcttatttttctttacggtctttaaaaaggccgtaatatccagctgaacggtctggttataggtacattgagcaactgactgaaatgcctcaaaatgttctttacgatgccattgggatatatcaacggtggtatatccagtgatttttttctccattttagcttccttagctcctgaaaatctcgataactcaaaaaatacgcccggtagtgatcttatttcattatggtgaaagttggaacctcttacgtgccaggccaaataggccgt

SEQ ID NO: 174 - DNA, 4504 bp, Artificial
  Synthetic
tcagatccttccgtatttagccagtatgttctctagtgtggttcgttgtttttgcgtgagccatgagaacgaaccattgagatcatgcttactttgcatgtcactcaaaaattttgcctcaaaactggtgagctgaatttttgcagttaaagcatcgtgtagtgtttttcttagtccgttacgtaggtaggaatctgatgtaatggttgttggtattttgtcaccattcatttttatctggttgttctcaagttcggttacgagatccatttgtctatctagttcaacttggaaaatcaacgtatcagtcgggcggcctcgcttatcaaccaccaatttcatattgctgtaagtgtttaaatctttacttattggtttcaaaacccattggttaagccttttaaactcatggtagttattttcaagcattaacatgaacttaaattcatcaaggctaatctctatatttgccttgtgagttttcttttgtgttagttcttttaataaccactcataaatcctcatagagtatttgttttcaaaagacttaacatgttccagattatattttatgaatttttttaactggaaaagataaggcaatatctcttcactaaaaactaattctaatttttcgcttgagaacttggcatagtttgtccactggaaaatcttaaagcctttaaccaaaggattcctgatttccacagttctcgtcatcagctctctggttgctttagctaatacaccataagcattttccctactgatgttcatcatctgagcgtattggttataagtgaacgataccgtccgttctttccttgtagggttttcaatcgtggggttgagtagtgccacacagcataaaattagcttggtttcatgctccgttaagtcatagcgactaatcgctagttcatttgctttgaaaacaactaattcagacatacatctcaattggtctaggtgattttaatcactataccaattgagatgggctagtcaatgataattactagtccttttcctttgagttgtgggtatctgtaaattctgctagacctttgctggaaaacttgtaaattctgctagaccctctgtaaattccgctagacctttgtgtgttttttttgtttatattcaagtggttataatttatagaataaagaaagaataaaaaaagataaaaagaatagatcccagccctgtgtataactcactactttagtcagttccgcagtattacaaaaggatgtcgcaaacgctgtttgctcctctacaaaacagaccttaaaaccctaaaggcttaagtagcaccctcgcaagctcgggcaaatcgctgaatattccttttgtctccgaccatcaggcacctgagtcgctgtctttttcgtgacattcagttcgctgcgctcacggctctggcagtgaatgggggtaaatggcactacaggcgccttttatggattcatgcaaggaaactacccataatacaagaaaagcccgtcacgggcttctcagggcgttttatggcgggtctgctatgtggtgctatctgactttttgctgttcagcagttcctgccctctgattttccagtctgaccacttcggattatcccgtgacaggtcattcagactggctaatgcacccagtaaggcagcggtatcatcaacaggcttacccgtcttactgtcaagaggacatccggtcaaataaaacgaaaggctcagtcgaaagactgggcctttcgttttgctgaggagacttagggaccctttatgacaacttgacggctacatcattcactttttcttcacaaccggcacggaactcgctcgggctggccccggtgcattttttaaatacccgcgagaaatagagttgatcgtcaaaaccaacattgcgaccgacggtggcgataggcatccgggtggtgctcaaaagcagcttcgcctggctgatacgttggtcctcgcgccagcttaagacgctaatccctaactgctggcggaaaagatgtgacagacgcgacggcgacaagcaaacatgctgtgcgacgctggcgatatcaaaattgctgtctgccaggtgatcgctgatgtactgacaagcctcgcgtacccgattatccatcggtggatggagcgactcgttaatcgcttccatgcgccgcagtaacaattgctcaagcagatttatcgccagcagctccgaatagcgcccttccccttgcccggcgttaatgatttgcccaaacaggtcgctgaaatgcggctggtgcgcttcatccgggcgaaagaaccccgtattggcaaatattgacggccagttaagccattcatgccagtaggcgcgcggacgaaagtaaacccactggtgataccattcgcgagcctccggatgacgaccgtagtgatgaatctctcctggcgggaacagcaaaatatcacccggtcggcaaacaaattctcgtccctgatttttcaccaccccctgaccgcgaatggtgagattgagaatataacctttcattcccagcggtcggtcgataaaaaaatcgagataaccgttggcctcaatcggcgttaaacccgccaccagatgggcattaaacgagtatcccggcagcaggggatcattttgcgcttcagccatacttttcatactcccaccattcagagaagaaaccaattgtccatattgcatcagacattgccgtcactgcgtcttttactggctcttctcgctaacccaaccggtaaccccgcttattaaaagcattctgtaacaaagcgggaccaaagccatgacaaaaacgcgtaacaaaagtgtctataatcacggcagaaaagtccacattgattatttgcacggcgtcacactttgctatgccatagcatttttatccataagattagcggatcctacctgacgctttttatcgcaactctctactgtttctccatacccgttttacctgcaggtgcagttatatttttggagacagacaatgtctgaagcaaatttcaaactagacgcttctgttcgtacagacctagggaaaggtgcgagccgccgcctacgtcgcgaagataagcttcctggtatcatctacggtggtgaagaagcaccagtttctatcacactagatcataacaaagtaaacaactctgctgactttgaagcgttttattctcacgttcttgagattaaccttgacggtaaagttgttgaagttctagttaaagatatgcaacgtcacccgttcaagccaaagatcacacacattgacttccaacgtgtaatcgctggtcaagacgttcacactaacgtaccacttcacttcgtaaatgaagagaaatctgctgctgttaaagctggcggtattgctgagcaccacgtaactgaaatcgaagttacttgtctacctaagaaccttcctgagttcatcgaagtagacatggctggtgttgaaatgggtcaaacgctacacctttctgacctaactcttccagctggcgtttcttcagttgaacttgcgaagaacgacgaagctcacgacctagcggttgtaactgttaagcctgctcctaaagcggctgacgcagaagaagacggcgaagaagcagcttctgaggaataatcctgttgacttaattaacggcactcctcagccaagtcaaaagcctccggtcggaggcttttgactacatgcccatggcgtttacgccccgccctgccactcatcgcagtactgttgtaattcattaagcattctgccgacatggaagccatcacaaacggcatgatgaacctgaatcgccagcggcatcagcaccttgtcgccttgcgtataatatttgcccatagtgaaaacgggggcgaagaagttgtccatattggccacgtttaaatcaaaactggtgaaactcacccagggattggctgagacgaaaaacatattctcaataaaccctttagggaaataggccaggttttcaccgtaacacgccacatcttgcgaatatatgtgtagaaactgccggaaatcgtcgtggtattcactccagagcgatgaaaacgtttcagtttgctcatggaaaacggtgtaacaagggtgaacactatcccatatcaccagctcaccgtctttcattgccatacggaactccggatgagcattcatcaggcgggcaagaatgtgaataaaggccggataaaacttgtgcttatttttctttacggtctttaaaaaggccgtaatatccagctgaacggtctggttataggtacattgagcaactgactgaaatgcctcaaaatgttctttacgatgccattgggatatatcaacggtggtatatccagtgatttttttctccattttagcttccttagctcctgaaaatctcgataactcaaaaaatacgcccggtagtgatcttatttcattatggtgaaagttggaacctcttacgtgccaggccaaataggccgt

SEQ ID NO: 175 - DNA, 4108 bp, Artificial
  Synthetic
tcagatccttccgtatttagccagtatgttctctagtgtggttcgttgtttttgcgtgagccatgagaacgaaccattgagatcatgcttactttgcatgtcactcaaaaattttgcctcaaaactggtgagctgaatttttgcagttaaagcatcgtgtagtgtttttcttagtccgttacgtaggtaggaatctgatgtaatggttgttggtattttgtcaccattcatttttatctggttgttctcaagttcggttacgagatccatttgtctatctagttcaacttggaaaatcaacgtatcagtcgggcggcctcgcttatcaaccaccaatttcatattgctgtaagtgtttaaatctttacttattggtttcaaaacccattggttaagccttttaaactcatggtagttattttcaagcattaacatgaacttaaattcatcaaggctaatctctatatttgccttgtgagttttcttttgtgttagttcttttaataaccactcataaatcctcatagagtatttgttttcaaaagacttaacatgttccagattatattttatgaatttttttaactggaaaagataaggcaatatctcttcactaaaaactaattctaatttttcgcttgagaacttggcatagtttgtccactggaaaatcttaaagcctttaaccaaaggattcctgatttccacagttctcgtcatcagctctctggttgctttagctaatacaccataagcattttccctactgatgttcatcatctgagcgtattggttataagtgaacgataccgtccgttctttccttgtagggttttcaatcgtggggttgagtagtgccacacagcataaaattagcttggtttcatgctccgttaagtcatagcgactaatcgctagttcatttgctttgaaaacaactaattcagacatacatctcaattggtctaggtgattttaatcactataccaattgagatgggctagtcaatgataattactagtccttttcctttgagttgtgggtatctgtaaattctgctagacctttgctggaaaacttgtaaattctgctagaccctctgtaaattccgctagacctttgtgtgttttttttgtttatattcaagtggttataatttatagaataaagaaagaataaaaaaagataaaaagaatagatcccagccctgtgtataactcactactttagtcagttccgcagtattacaaaaggatgtcgcaaacgctgtttgctcctctacaaaacagaccttaaaaccctaaaggcttaagtagcaccctcgcaagctcgggcaaatcgctgaatattccttttgtctccgaccatcaggcacctgagtcgctgtctttttcgtgacattcagttcgctgcgctcacggctctggcagtgaatgggggtaaatggcactacaggcgccttttatggattcatgcaaggaaactacccataatacaagaaaagcccgtcacgggcttctcagggcgttttatggcgggtctgctatgtggtgctatctgactttttgctgttcagcagttcctgccctctgattttccagtctgaccacttcggattatcccgtgacaggtcattcagactggctaatgcacccagtaaggcagcggtatcatcaacaggcttacccgtcttactgtcaagaggacatccggtcaaataaaacgaaaggctcagtcgaaagactgggcctttcgttttgctgaggagacttagggaccctttatgacaacttgacggctacatcattcactttttcttcacaaccggcacggaactcgctcgggctggccccggtgcattttttaaatacccgcgagaaatagagttgatcgtcaaaaccaacattgcgaccgacggtggcgataggcatccgggtggtgctcaaaagcagcttcgcctggctgatacgttggtcctcgcgccagcttaagacgctaatccctaactgctggcggaaaagatgtgacagacgcgacggcgacaagcaaacatgctgtgcgacgctggcgatatcaaaattgctgtctgccaggtgatcgctgatgtactgacaagcctcgcgtacccgattatccatcggtggatggagcgactcgttaatcgcttccatgcgccgcagtaacaattgctcaagcagatttatcgccagcagctccgaatagcgcccttccccttgcccggcgttaatgatttgcccaaacaggtcgctgaaatgcggctggtgcgcttcatccgggcgaaagaaccccgtattggcaaatattgacggccagttaagccattcatgccagtaggcgcgcggacgaaagtaaacccactggtgataccattcgcgagcctccggatgacgaccgtagtgatgaatctctcctggcgggaacagcaaaatatcacccggtcggcaaacaaattctcgtccctgatttttcaccaccccctgaccgcgaatggtgagattgagaatataacctttcattcccagcggtcggtcgataaaaaaatcgagataaccgttggcctcaatcggcgttaaacccgccaccagatgggcattaaacgagtatcccggcagcaggggatcattttgcgcttcagccatacttttcatactcccaccattcagagaagaaaccaattgtccatattgcatcagacattgccgtcactgcgtcttttactggctcttctcgctaacccaaccggtaaccccgcttattaaaagcattctgtaacaaagcgggaccaaagccatgacaaaaacgcgtaacaaaagtgtctataatcacggcagaaaagtccacattgattatttgcacggcgtcacactttgctatgccatagcatttttatccataagattagcggatcctacctgacgctttttatcgcaactctctactgtttctccatacccgttttacctgcaggtgcagtttgttctggagacaaatacaatgtcaagagtatgccaagtaacaggtaagcgtccaacggttggtaataaccgttcacacgcaagaaatgcgactcgtcgtcgctttttgccaaaccttcaaacacaccgtttttgggttgagagcgaaaaccgttttgtaaaactacgtttgtctgcaaaaggcatgcgtatcatcgacaagaaaggtattgattcagtactaactgacatccgtacccgtggtgagaaaatctaaggaagccgacttaattaacggcactcctcagccaagtcaaaagcctccggtcggaggcttttgactacatgcccatggcgtttacgccccgccctgccactcatcgcagtactgttgtaattcattaagcattctgccgacatggaagccatcacaaacggcatgatgaacctgaatcgccagcggcatcagcaccttgtcgccttgcgtataatatttgcccatagtgaaaacgggggcgaagaagttgtccatattggccacgtttaaatcaaaactggtgaaactcacccagggattggctgagacgaaaaacatattctcaataaaccctttagggaaataggccaggttttcaccgtaacacgccacatcttgcgaatatatgtgtagaaactgccggaaatcgtcgtggtattcactccagagcgatgaaaacgtttcagtttgctcatggaaaacggtgtaacaagggtgaacactatcccatatcaccagctcaccgtctttcattgccatacggaactccggatgagcattcatcaggcgggcaagaatgtgaataaaggccggataaaacttgtgcttatttttctttacggtctttaaaaaggccgtaatatccagctgaacggtctggttataggtacattgagcaactgactgaaatgcctcaaaatgttctttacgatgccattgggatatatcaacggtggtatatccagtgatttttttctccattttagcttccttagctcctgaaaatctcgataactcaaaaaatacgcccggtagtgatcttatttcattatggtgaaagttggaacctcttacgtgccaggccaaataggccgt

SEQ ID NO: 176 - DNA, 4027 bp, Artificial
  Synthetic
tcagatccttccgtatttagccagtatgttctctagtgtggttcgttgtttttgcgtgagccatgagaacgaaccattgagatcatgcttactttgcatgtcactcaaaaattttgcctcaaaactggtgagctgaatttttgcagttaaagcatcgtgtagtgtttttcttagtccgttacgtaggtaggaatctgatgtaatggttgttggtattttgtcaccattcatttttatctggttgttctcaagttcggttacgagatccatttgtctatctagttcaacttggaaaatcaacgtatcagtcgggcggcctcgcttatcaaccaccaatttcatattgctgtaagtgtttaaatctttacttattggtttcaaaacccattggttaagccttttaaactcatggtagttattttcaagcattaacatgaacttaaattcatcaaggctaatctctatatttgccttgtgagttttcttttgtgttagttcttttaataaccactcataaatcctcatagagtatttgttttcaaaagacttaacatgttccagattatattttatgaatttttttaactggaaaagataaggcaatatctcttcactaaaaactaattctaatttttcgcttgagaacttggcatagtttgtccactggaaaatcttaaagcctttaaccaaaggattcctgatttccacagttctcgtcatcagctctctggttgctttagctaatacaccataagcattttccctactgatgttcatcatctgagcgtattggttataagtgaacgataccgtccgttctttccttgtagggttttcaatcgtggggttgagtagtgccacacagcataaaattagcttggtttcatgctccgttaagtcatagcgactaatcgctagttcatttgctttgaaaacaactaattcagacatacatctcaattggtctaggtgattttaatcactataccaattgagatgggctagtcaatgataattactagtccttttcctttgagttgtgggtatctgtaaattctgctagacctttgctggaaaacttgtaaattctgctagaccctctgtaaattccgctagacctttgtgtgttttttttgtttatattcaagtggttataatttatagaataaagaaagaataaaaaaagataaaaagaatagatcccagccctgtgtataactcactactttagtcagttccgcagtattacaaaaggatgtcgcaaacgctgtttgctcctctacaaaacagaccttaaaaccctaaaggcttaagtagcaccctcgcaagctcgggcaaatcgctgaatattccttttgtctccgaccatcaggcacctgagtcgctgtctttttcgtgacattcagttcgctgcgctcacggctctggcagtgaatgggggtaaatggcactacaggcgccttttatggattcatgcaaggaaactacccataatacaagaaaagcccgtcacgggcttctcagggcgttttatggcgggtctgctatgtggtgctatctgactttttgctgttcagcagttcctgccctctgattttccagtctgaccacttcggattatcccgtgacaggtcattcagactggctaatgcacccagtaaggcagcggtatcatcaacaggcttacccgtcttactgtcaagaggacatccggtcaaataaaacgaaaggctcagtcgaaagactgggcctttcgttttgctgaggagacttagggaccctttatgacaacttgacggctacatcattcactttttcttcacaaccggcacggaactcgctcgggctggccccggtgcattttttaaatacccgcgagaaatagagttgatcgtcaaaaccaacattgcgaccgacggtggcgataggcatccgggtggtgctcaaaagcagcttcgcctggctgatacgttggtcctcgcgccagcttaagacgctaatccctaactgctggcggaaaagatgtgacagacgcgacggcgacaagcaaacatgctgtgcgacgctggcgatatcaaaattgctgtctgccaggtgatcgctgatgtactgacaagcctcgcgtacccgattatccatcggtggatggagcgactcgttaatcgcttccatgcgccgcagtaacaattgctcaagcagatttatcgccagcagctccgaatagcgcccttccccttgcccggcgttaatgatttgcccaaacaggtcgctgaaatgcggctggtgcgcttcatccgggcgaaagaaccccgtattggcaaatattgacggccagttaagccattcatgccagtaggcgcgcggacgaaagtaaacccactggtgataccattcgcgagcctccggatgacgaccgtagtgatgaatctctcctggcgggaacagcaaaatatcacccggtcggcaaacaaattctcgtccctgatttttcaccaccccctgaccgcgaatggtgagattgagaatataacctttcattcccagcggtcggtcgataaaaaaatcgagataaccgttggcctcaatcggcgttaaacccgccaccagatgggcattaaacgagtatcccggcagcaggggatcattttgcgcttcagccatacttttcatactcccaccattcagagaagaaaccaattgtccatattgcatcagacattgccgtcactgcgtcttttactggctcttctcgctaacccaaccggtaaccccgcttattaaaagcattctgtaacaaagcgggaccaaagccatgacaaaaacgcgtaacaaaagtgtctataatcacggcagaaaagtccacattgattatttgcacggcgtcacactttgctatgccatagcatttttatccataagattagcggatcctacctgacgctttttatcgcaactctctactgtttctccatacccgttttacctgcaggtgcagtaaaatctaaggaagccgacaatgcgtgataaaattaaactagtttcttcagcaggtacaggtttcttctacactactgataaaaacaagcgtaacatgcctggcaaaatggagatcaaaaagtatgatcccgttgtgcgtaagcacgttatgttcaaagaggccaaaatcaagtaattagcttgacttaattaacggcactcctcagccaagtcaaaagcctccggtcggaggcttttgactacatgcccatggcgtttacgccccgccctgccactcatcgcagtactgttgtaattcattaagcattctgccgacatggaagccatcacaaacggcatgatgaacctgaatcgccagcggcatcagcaccttgtcgccttgcgtataatatttgcccatagtgaaaacgggggcgaagaagttgtccatattggccacgtttaaatcaaaactggtgaaactcacccagggattggctgagacgaaaaacatattctcaataaaccctttagggaaataggccaggttttcaccgtaacacgccacatcttgcgaatatatgtgtagaaactgccggaaatcgtcgtggtattcactccagagcgatgaaaacgtttcagtttgctcatggaaaacggtgtaacaagggtgaacactatcccatatcaccagctcaccgtctttcattgccatacggaactccggatgagcattcatcaggcgggcaagaatgtgaataaaggccggataaaacttgtgcttatttttctttacggtctttaaaaaggccgtaatatccagctgaacggtctggttataggtacattgagcaactgactgaaatgcctcaaaatgttctttacgatgccattgggatatatcaacggtggtatatccagtgatttttttctccattttagcttccttagctcctgaaaatctcgataactcaaaaaatacgcccggtagtgatcttatttcattatggtgaaagttggaacctcttacgtgccaggccaaataggccgt

SEQ ID NO: 177 - DNA, 4084 bp, Artificial
  Synthetic
tcagatccttccgtatttagccagtatgttctctagtgtggttcgttgtttttgcgtgagccatgagaacgaaccattgagatcatgcttactttgcatgtcactcaaaaattttgcctcaaaactggtgagctgaatttttgcagttaaagcatcgtgtagtgtttttcttagtccgttacgtaggtaggaatctgatgtaatggttgttggtattttgtcaccattcatttttatctggttgttctcaagttcggttacgagatccatttgtctatctagttcaacttggaaaatcaacgtatcagtcgggcggcctcgcttatcaaccaccaatttcatattgctgtaagtgtttaaatctttacttattggtttcaaaacccattggttaagccttttaaactcatggtagttattttcaagcattaacatgaacttaaattcatcaaggctaatctctatatttgccttgtgagttttcttttgtgttagttcttttaataaccactcataaatcctcatagagtatttgttttcaaaagacttaacatgttccagattatattttatgaatttttttaactggaaaagataaggcaatatctcttcactaaaaactaattctaatttttcgcttgagaacttggcatagtttgtccactggaaaatcttaaagcctttaaccaaaggattcctgatttccacagttctcgtcatcagctctctggttgctttagctaatacaccataagcattttccctactgatgttcatcatctgagcgtattggttataagtgaacgataccgtccgttctttccttgtagggttttcaatcgtggggttgagtagtgccacacagcataaaattagcttggtttcatgctccgttaagtcatagcgactaatcgctagttcatttgctttgaaaacaactaattcagacatacatctcaattggtctaggtgattttaatcactataccaattgagatgggctagtcaatgataattactagtccttttcctttgagttgtgggtatctgtaaattctgctagacctttgctggaaaacttgtaaattctgctagaccctctgtaaattccgctagacctttgtgtgttttttttgtttatattcaagtggttataatttatagaataaagaaagaataaaaaaagataaaaagaatagatcccagccctgtgtataactcactactttagtcagttccgcagtattacaaaaggatgtcgcaaacgctgtttgctcctctacaaaacagaccttaaaaccctaaaggcttaagtagcaccctcgcaagctcgggcaaatcgctgaatattccttttgtctccgaccatcaggcacctgagtcgctgtctttttcgtgacattcagttcgctgcgctcacggctctggcagtgaatgggggtaaatggcactacaggcgccttttatggattcatgcaaggaaactacccataatacaagaaaagcccgtcacgggcttctcagggcgttttatggcgggtctgctatgtggtgctatctgactttttgctgttcagcagttcctgccctctgattttccagtctgaccacttcggattatcccgtgacaggtcattcagactggctaatgcacccagtaaggcagcggtatcatcaacaggcttacccgtcttactgtcaagaggacatccggtcaaataaaacgaaaggctcagtcgaaagactgggcctttcgttttgctgaggagacttagggaccctttatgacaacttgacggctacatcattcactttttcttcacaaccggcacggaactcgctcgggctggccccggtgcattttttaaatacccgcgagaaatagagttgatcgtcaaaaccaacattgcgaccgacggtggcgataggcatccgggtggtgctcaaaagcagcttcgcctggctgatacgttggtcctcgcgccagcttaagacgctaatccctaactgctggcggaaaagatgtgacagacgcgacggcgacaagcaaacatgctgtgcgacgctggcgatatcaaaattgctgtctgccaggtgatcgctgatgtactgacaagcctcgcgtacccgattatccatcggtggatggagcgactcgttaatcgcttccatgcgccgcagtaacaattgctcaagcagatttatcgccagcagctccgaatagcgcccttccccttgcccggcgttaatgatttgcccaaacaggtcgctgaaatgcggctggtgcgcttcatccgggcgaaagaaccccgtattggcaaatattgacggccagttaagccattcatgccagtaggcgcgcggacgaaagtaaacccactggtgataccattcgcgagcctccggatgacgaccgtagtgatgaatctctcctggcgggaacagcaaaatatcacccggtcggcaaacaaattctcgtccctgatttttcaccaccccctgaccgcgaatggtgagattgagaatataacctttcattcccagcggtcggtcgataaaaaaatcgagataaccgttggcctcaatcggcgttaaacccgccaccagatgggcattaaacgagtatcccggcagcaggggatcattttgcgcttcagccatacttttcatactcccaccattcagagaagaaaccaattgtccatattgcatcagacattgccgtcactgcgtcttttactggctcttctcgctaacccaaccggtaaccccgcttattaaaagcattctgtaacaaagcgggaccaaagccatgacaaaaacgcgtaacaaaagtgtctataatcacggcagaaaagtccacattgattatttgcacggcgtcacactttgctatgccatagcatttttatccataagattagcggatcctacctgacgctttttatcgcaactctctactgtttctccatacccgttttacctgcaggtgcagtttattatgtgaggtaacccaatgaaacaagatatccacccaaaatacgaagaaatcacagcaacttgctcatgtggtaacgtaatgaacattcgttctacgcttggtaaagacatcaacctagacgtatgttcttcatgtcacccattctacactggtaagcaacgtaacgttgacactggtggtcgtgttgatcgcttcaagaagcgtttcggtgcattgggcaaaaagtaagcctgataacttaattaacggcactcctcagccaagtcaaaagcctccggtcggaggcttttgactacatgcccatggcgtttacgccccgccctgccactcatcgcagtactgttgtaattcattaagcattctgccgacatggaagccatcacaaacggcatgatgaacctgaatcgccagcggcatcagcaccttgtcgccttgcgtataatatttgcccatagtgaaaacgggggcgaagaagttgtccatattggccacgtttaaatcaaaactggtgaaactcacccagggattggctgagacgaaaaacatattctcaataaaccctttagggaaataggccaggttttcaccgtaacacgccacatcttgcgaatatatgtgtagaaactgccggaaatcgtcgtggtattcactccagagcgatgaaaacgtttcagtttgctcatggaaaacggtgtaacaagggtgaacactatcccatatcaccagctcaccgtctttcattgccatacggaactccggatgagcattcatcaggcgggcaagaatgtgaataaaggccggataaaacttgtgcttatttttctttacggtctttaaaaaggccgtaatatccagctgaacggtctggttataggtacattgagcaactgactgaaatgcctcaaaatgttctttacgatgccattgggatatatcaacggtggtatatccagtgatttttttctccattttagcttccttagctcctgaaaatctcgataactcaaaaaatacgcccggtagtgatcttatttcattatggtgaaagttggaacctcttacgtgccaggccaaataggccgt

SEQ ID NO: 178 - DNA, 4042 bp, Artificial
  Synthetic
tcagatccttccgtatttagccagtatgttctctagtgtggttcgttgtttttgcgtgagccatgagaacgaaccattgagatcatgcttactttgcatgtcactcaaaaattttgcctcaaaactggtgagctgaatttttgcagttaaagcatcgtgtagtgtttttcttagtccgttacgtaggtaggaatctgatgtaatggttgttggtattttgtcaccattcatttttatctggttgttctcaagttcggttacgagatccatttgtctatctagttcaacttggaaaatcaacgtatcagtcgggcggcctcgcttatcaaccaccaatttcatattgctgtaagtgtttaaatctttacttattggtttcaaaacccattggttaagccttttaaactcatggtagttattttcaagcattaacatgaacttaaattcatcaaggctaatctctatatttgccttgtgagttttcttttgtgttagttcttttaataaccactcataaatcctcatagagtatttgttttcaaaagacttaacatgttccagattatattttatgaatttttttaactggaaaagataaggcaatatctcttcactaaaaactaattctaatttttcgcttgagaacttggcatagtttgtccactggaaaatcttaaagcctttaaccaaaggattcctgatttccacagttctcgtcatcagctctctggttgctttagctaatacaccataagcattttccctactgatgttcatcatctgagcgtattggttataagtgaacgataccgtccgttctttccttgtagggttttcaatcgtggggttgagtagtgccacacagcataaaattagcttggtttcatgctccgttaagtcatagcgactaatcgctagttcatttgctttgaaaacaactaattcagacatacatctcaattggtctaggtgattttaatcactataccaattgagatgggctagtcaatgataattactagtccttttcctttgagttgtgggtatctgtaaattctgctagacctttgctggaaaacttgtaaattctgctagaccctctgtaaattccgctagacctttgtgtgttttttttgtttatattcaagtggttataatttatagaataaagaaagaataaaaaaagataaaaagaatagatcccagccctgtgtataactcactactttagtcagttccgcagtattacaaaaggatgtcgcaaacgctgtttgctcctctacaaaacagaccttaaaaccctaaaggcttaagtagcaccctcgcaagctcgggcaaatcgctgaatattccttttgtctccgaccatcaggcacctgagtcgctgtctttttcgtgacattcagttcgctgcgctcacggctctggcagtgaatgggggtaaatggcactacaggcgccttttatggattcatgcaaggaaactacccataatacaagaaaagcccgtcacgggcttctcagggcgttttatggcgggtctgctatgtggtgctatctgactttttgctgttcagcagttcctgccctctgattttccagtctgaccacttcggattatcccgtgacaggtcattcagactggctaatgcacccagtaaggcagcggtatcatcaacaggcttacccgtcttactgtcaagaggacatccggtcaaataaaacgaaaggctcagtcgaaagactgggcctttcgttttgctgaggagacttagggaccctttatgacaacttgacggctacatcattcactttttcttcacaaccggcacggaactcgctcgggctggccccggtgcattttttaaatacccgcgagaaatagagttgatcgtcaaaaccaacattgcgaccgacggtggcgataggcatccgggtggtgctcaaaagcagcttcgcctggctgatacgttggtcctcgcgccagcttaagacgctaatccctaactgctggcggaaaagatgtgacagacgcgacggcgacaagcaaacatgctgtgcgacgctggcgatatcaaaattgctgtctgccaggtgatcgctgatgtactgacaagcctcgcgtacccgattatccatcggtggatggagcgactcgttaatcgcttccatgcgccgcagtaacaattgctcaagcagatttatcgccagcagctccgaatagcgcccttccccttgcccggcgttaatgatttgcccaaacaggtcgctgaaatgcggctggtgcgcttcatccgggcgaaagaaccccgtattggcaaatattgacggccagttaagccattcatgccagtaggcgcgcggacgaaagtaaacccactggtgataccattcgcgagcctccggatgacgaccgtagtgatgaatctctcctggcgggaacagcaaaatatcacccggtcggcaaacaaattctcgtccctgatttttcaccaccccctgaccgcgaatggtgagattgagaatataacctttcattcccagcggtcggtcgataaaaaaatcgagataaccgttggcctcaatcggcgttaaacccgccaccagatgggcattaaacgagtatcccggcagcaggggatcattttgcgcttcagccatacttttcatactcccaccattcagagaagaaaccaattgtccatattgcatcagacattgccgtcactgcgtcttttactggctcttctcgctaacccaaccggtaaccccgcttattaaaagcattctgtaacaaagcgggaccaaagccatgacaaaaacgcgtaacaaaagtgtctataatcacggcagaaaagtccacattgattatttgcacggcgtcacactttgctatgccatagcatttttatccataagattagcggatcctacctgacgctttttatcgcaactctctactgtttctccatacccgttttacctgcaggtgcagtagcgagaccaggagtaagttatggcagtacaacaaaatcgtaaaacgcgttctaagcgcggtatgcgtcgctcacacgatgcattgacaggcgcgactttgtctgtcgattcaacgtcgggcgaaactcaccgtcgtcaccacgtgaccgctgacggttattacaaaggcaagaaagtaatcggcgcgtaatacggcgaacttaattaacggcactcctcagccaagtcaaaagcctccggtcggaggcttttgactacatgcccatggcgtttacgccccgccctgccactcatcgcagtactgttgtaattcattaagcattctgccgacatggaagccatcacaaacggcatgatgaacctgaatcgccagcggcatcagcaccttgtcgccttgcgtataatatttgcccatagtgaaaacgggggcgaagaagttgtccatattggccacgtttaaatcaaaactggtgaaactcacccagggattggctgagacgaaaaacatattctcaataaaccctttagggaaataggccaggttttcaccgtaacacgccacatcttgcgaatatatgtgtagaaactgccggaaatcgtcgtggtattcactccagagcgatgaaaacgtttcagtttgctcatggaaaacggtgtaacaagggtgaacactatcccatatcaccagctcaccgtctttcattgccatacggaactccggatgagcattcatcaggcgggcaagaatgtgaataaaggccggataaaacttgtgcttatttttctttacggtctttaaaaaggccgtaatatccagctgaacggtctggttataggtacattgagcaactgactgaaatgcctcaaaatgttctttacgatgccattgggatatatcaacggtggtatatccagtgatttttttctccattttagcttccttagctcctgaaaatctcgataactcaaaaaatacgcccggtagtgatcttatttcattatggtgaaagttggaacctcttacgtgccaggccaaataggccgt

SEQ ID NO: 179 - DNA, 4006 bp, Artificial
  Synthetic
tcagatccttccgtatttagccagtatgttctctagtgtggttcgttgtttttgcgtgagccatgagaacgaaccattgagatcatgcttactttgcatgtcactcaaaaattttgcctcaaaactggtgagctgaatttttgcagttaaagcatcgtgtagtgtttttcttagtccgttacgtaggtaggaatctgatgtaatggttgttggtattttgtcaccattcatttttatctggttgttctcaagttcggttacgagatccatttgtctatctagttcaacttggaaaatcaacgtatcagtcgggcggcctcgcttatcaaccaccaatttcatattgctgtaagtgtttaaatctttacttattggtttcaaaacccattggttaagccttttaaactcatggtagttattttcaagcattaacatgaacttaaattcatcaaggctaatctctatatttgccttgtgagttttcttttgtgttagttcttttaataaccactcataaatcctcatagagtatttgttttcaaaagacttaacatgttccagattatattttatgaatttttttaactggaaaagataaggcaatatctcttcactaaaaactaattctaatttttcgcttgagaacttggcatagtttgtccactggaaaatcttaaagcctttaaccaaaggattcctgatttccacagttctcgtcatcagctctctggttgctttagctaatacaccataagcattttccctactgatgttcatcatctgagcgtattggttataagtgaacgataccgtccgttctttccttgtagggttttcaatcgtggggttgagtagtgccacacagcataaaattagcttggtttcatgctccgttaagtcatagcgactaatcgctagttcatttgctttgaaaacaactaattcagacatacatctcaattggtctaggtgattttaatcactataccaattgagatgggctagtcaatgataattactagtccttttcctttgagttgtgggtatctgtaaattctgctagacctttgctggaaaacttgtaaattctgctagaccctctgtaaattccgctagacctttgtgtgttttttttgtttatattcaagtggttataatttatagaataaagaaagaataaaaaaagataaaaagaatagatcccagccctgtgtataactcactactttagtcagttccgcagtattacaaaaggatgtcgcaaacgctgtttgctcctctacaaaacagaccttaaaaccctaaaggcttaagtagcaccctcgcaagctcgggcaaatcgctgaatattccttttgtctccgaccatcaggcacctgagtcgctgtctttttcgtgacattcagttcgctgcgctcacggctctggcagtgaatgggggtaaatggcactacaggcgccttttatggattcatgcaaggaaactacccataatacaagaaaagcccgtcacgggcttctcagggcgttttatggcgggtctgctatgtggtgctatctgactttttgctgttcagcagttcctgccctctgattttccagtctgaccacttcggattatcccgtgacaggtcattcagactggctaatgcacccagtaaggcagcggtatcatcaacaggcttacccgtcttactgtcaagaggacatccggtcaaataaaacgaaaggctcagtcgaaagactgggcctttcgttttgctgaggagacttagggaccctttatgacaacttgacggctacatcattcactttttcttcacaaccggcacggaactcgctcgggctggccccggtgcattttttaaatacccgcgagaaatagagttgatcgtcaaaaccaacattgcgaccgacggtggcgataggcatccgggtggtgctcaaaagcagcttcgcctggctgatacgttggtcctcgcgccagcttaagacgctaatccctaactgctggcggaaaagatgtgacagacgcgacggcgacaagcaaacatgctgtgcgacgctggcgatatcaaaattgctgtctgccaggtgatcgctgatgtactgacaagcctcgcgtacccgattatccatcggtggatggagcgactcgttaatcgcttccatgcgccgcagtaacaattgctcaagcagatttatcgccagcagctccgaatagcgcccttccccttgcccggcgttaatgatttgcccaaacaggtcgctgaaatgcggctggtgcgcttcatccgggcgaaagaaccccgtattggcaaatattgacggccagttaagccattcatgccagtaggcgcgcggacgaaagtaaacccactggtgataccattcgcgagcctccggatgacgaccgtagtgatgaatctctcctggcgggaacagcaaaatatcacccggtcggcaaacaaattctcgtccctgatttttcaccaccccctgaccgcgaatggtgagattgagaatataacctttcattcccagcggtcggtcgataaaaaaatcgagataaccgttggcctcaatcggcgttaaacccgccaccagatgggcattaaacgagtatcccggcagcaggggatcattttgcgcttcagccatacttttcatactcccaccattcagagaagaaaccaattgtccatattgcatcagacattgccgtcactgcgtcttttactggctcttctcgctaacccaaccggtaaccccgcttattaaaagcattctgtaacaaagcgggaccaaagccatgacaaaaacgcgtaacaaaagtgtctataatcacggcagaaaagtccacattgattatttgcacggcgtcacactttgctatgccatagcatttttatccataagattagcggatcctacctgacgctttttatcgcaactctctactgtttctccatacccgttttacctgcaggtgcagtatataagtgagactttggtcatgaaaagaacatttcaaccgagcaatctaaagcgcaagcgttctcacggttttcgtgctcgtatggcgactaaaaatggtcgtaaagtactagcagctcgccgtgcaaaaggccgcgctcgtctttcagcttaattgaaagaacttaattaacggcactcctcagccaagtcaaaagcctccggtcggaggcttttgactacatgcccatggcgtttacgccccgccctgccactcatcgcagtactgttgtaattcattaagcattctgccgacatggaagccatcacaaacggcatgatgaacctgaatcgccagcggcatcagcaccttgtcgccttgcgtataatatttgcccatagtgaaaacgggggcgaagaagttgtccatattggccacgtttaaatcaaaactggtgaaactcacccagggattggctgagacgaaaaacatattctcaataaaccctttagggaaataggccaggttttcaccgtaacacgccacatcttgcgaatatatgtgtagaaactgccggaaatcgtcgtggtattcactccagagcgatgaaaacgtttcagtttgctcatggaaaacggtgtaacaagggtgaacactatcccatatcaccagctcaccgtctttcattgccatacggaactccggatgagcattcatcaggcgggcaagaatgtgaataaaggccggataaaacttgtgcttatttttctttacggtctttaaaaaggccgtaatatccagctgaacggtctggttataggtacattgagcaactgactgaaatgcctcaaaatgttctttacgatgccattgggatatatcaacggtggtatatccagtgatttttttctccattttagcttccttagctcctgaaaatctcgataactcaaaaaatacgcccggtagtgatcttatttcattatggtgaaagttggaacctcttacgtgccaggccaaataggccgt

SEQ ID NO: 180 - DNA, 4409 bp, Artificial
  Synthetic
tcagatccttccgtatttagccagtatgttctctagtgtggttcgttgtttttgcgtgagccatgagaacgaaccattgagatcatgcttactttgcatgtcactcaaaaattttgcctcaaaactggtgagctgaatttttgcagttaaagcatcgtgtagtgtttttcttagtccgttacgtaggtaggaatctgatgtaatggttgttggtattttgtcaccattcatttttatctggttgttctcaagttcggttacgagatccatttgtctatctagttcaacttggaaaatcaacgtatcagtcgggcggcctcgcttatcaaccaccaatttcatattgctgtaagtgtttaaatctttacttattggtttcaaaacccattggttaagccttttaaactcatggtagttattttcaagcattaacatgaacttaaattcatcaaggctaatctctatatttgccttgtgagttttcttttgtgttagttcttttaataaccactcataaatcctcatagagtatttgttttcaaaagacttaacatgttccagattatattttatgaatttttttaactggaaaagataaggcaatatctcttcactaaaaactaattctaatttttcgcttgagaacttggcatagtttgtccactggaaaatcttaaagcctttaaccaaaggattcctgatttccacagttctcgtcatcagctctctggttgctttagctaatacaccataagcattttccctactgatgttcatcatctgagcgtattggttataagtgaacgataccgtccgttctttccttgtagggttttcaatcgtggggttgagtagtgccacacagcataaaattagcttggtttcatgctccgttaagtcatagcgactaatcgctagttcatttgctttgaaaacaactaattcagacatacatctcaattggtctaggtgattttaatcactataccaattgagatgggctagtcaatgataattactagtccttttcctttgagttgtgggtatctgtaaattctgctagacctttgctggaaaacttgtaaattctgctagaccctctgtaaattccgctagacctttgtgtgttttttttgtttatattcaagtggttataatttatagaataaagaaagaataaaaaaagataaaaagaatagatcccagccctgtgtataactcactactttagtcagttccgcagtattacaaaaggatgtcgcaaacgctgtttgctcctctacaaaacagaccttaaaaccctaaaggcttaagtagcaccctcgcaagctcgggcaaatcgctgaatattccttttgtctccgaccatcaggcacctgagtcgctgtctttttcgtgacattcagttcgctgcgctcacggctctggcagtgaatgggggtaaatggcactacaggcgccttttatggattcatgcaaggaaactacccataatacaagaaaagcccgtcacgggcttctcagggcgttttatggcgggtctgctatgtggtgctatctgactttttgctgttcagcagttcctgccctctgattttccagtctgaccacttcggattatcccgtgacaggtcattcagactggctaatgcacccagtaaggcagcggtatcatcaacaggcttacccgtcttactgtcaagaggacatccggtcaaataaaacgaaaggctcagtcgaaagactgggcctttcgttttgctgaggagacttagggaccctttatgacaacttgacggctacatcattcactttttcttcacaaccggcacggaactcgctcgggctggccccggtgcattttttaaatacccgcgagaaatagagttgatcgtcaaaaccaacattgcgaccgacggtggcgataggcatccgggtggtgctcaaaagcagcttcgcctggctgatacgttggtcctcgcgccagcttaagacgctaatccctaactgctggcggaaaagatgtgacagacgcgacggcgacaagcaaacatgctgtgcgacgctggcgatatcaaaattgctgtctgccaggtgatcgctgatgtactgacaagcctcgcgtacccgattatccatcggtggatggagcgactcgttaatcgcttccatgcgccgcagtaacaattgctcaagcagatttatcgccagcagctccgaatagcgcccttccccttgcccggcgttaatgatttgcccaaacaggtcgctgaaatgcggctggtgcgcttcatccgggcgaaagaaccccgtattggcaaatattgacggccagttaagccattcatgccagtaggcgcgcggacgaaagtaaacccactggtgataccattcgcgagcctccggatgacgaccgtagtgatgaatctctcctggcgggaacagcaaaatatcacccggtcggcaaacaaattctcgtccctgatttttcaccaccccctgaccgcgaatggtgagattgagaatataacctttcattcccagcggtcggtcgataaaaaaatcgagataaccgttggcctcaatcggcgttaaacccgccaccagatgggcattaaacgagtatcccggcagcaggggatcattttgcgcttcagccatacttttcatactcccaccattcagagaagaaaccaattgtccatattgcatcagacattgccgtcactgcgtcttttactggctcttctcgctaacccaaccggtaaccccgcttattaaaagcattctgtaacaaagcgggaccaaagccatgacaaaaacgcgtaacaaaagtgtctataatcacggcagaaaagtccacattgattatttgcacggcgtcacactttgctatgccatagcatttttatccataagattagcggatcctacctgacgctttttatcgcaactctctactgtttctccatacccgttttacctgcaggtgcagtttctttcaggagattccaatatggcaaacagcgcacaagcacgcaaacgtgcccgccagtccgtcaaacaacgcgcccacaacgctagcctgcgtaccgcattccgcaccgcagtgaaaaaagtattgaaagcagtcgaagcaggcgataaagctgccgcacgagcggtttaccaagagtccgtcaaagtcatcgaccgcatcgccgacaaaggcgtgttccacaaaaacaaagcggctcgccacaaaagccgcctgtctgcaaaagtaaaagcactggcttgatttttgcattttctcaaaaggactcaaaatggtagttatccgtttggcacgcggcggctcgaaacaccgccccttctacaacgtcatcgttactgactcacgcagccgccgcgacggccgcttcatcgaacgcgtaggcttctacaaccccgtagccaacgaaaaacaagagcgcgtccgcctcaatgcagaccgcctgaaccactggattgcacaaggcgcgcaagtcagcgactccgttgcaaaactgattaaagaacaaaaagccgtctaatccgcgttacttaattaacggcactcctcagccaagtcaaaagcctccggtcggaggcttttgactacatgcccatggcgtttacgccccgccctgccactcatcgcagtactgttgtaattcattaagcattctgccgacatggaagccatcacaaacggcatgatgaacctgaatcgccagcggcatcagcaccttgtcgccttgcgtataatatttgcccatagtgaaaacgggggcgaagaagttgtccatattggccacgtttaaatcaaaactggtgaaactcacccagggattggctgagacgaaaaacatattctcaataaaccctttagggaaataggccaggttttcaccgtaacacgccacatcttgcgaatatatgtgtagaaactgccggaaatcgtcgtggtattcactccagagcgatgaaaacgtttcagtttgctcatggaaaacggtgtaacaagggtgaacactatcccatatcaccagctcaccgtctttcattgccatacggaactccggatgagcattcatcaggcgggcaagaatgtgaataaaggccggataaaacttgtgcttatttttctttacggtctttaaaaaggccgtaatatccagctgaacggtctggttataggtacattgagcaactgactgaaatgcctcaaaatgttctttacgatgccattgggatatatcaacggtggtatatccagtgatttttttctccattttagcttccttagctcctgaaaatctcgataactcaaaaaatacgcccggtagtgatcttatttcattatggtgaaagttggaacctcttacgtgccaagccaaataggccgt

SEQ ID NO: 181 - DNA, 6421 bp, Artificial
  Synthetic
tcagatccttccgtatttagccagtatgttctctagtgtggttcgttgtttttgcgtgagccatgagaacgaaccattgagatcatgcttactttgcatgtcactcaaaaattttgcctcaaaactggtgagctgaatttttgcagttaaagcatcgtgtagtgtttttcttagtccgttacgtaggtaggaatctgatgtaatggttgttggtattttgtcaccattcatttttatctggttgttctcaagttcggttacgagatccatttgtctatctagttcaacttggaaaatcaacgtatcagtcgggcggcctcgcttatcaaccaccaatttcatattgctgtaagtgtttaaatctttacttattggtttcaaaacccattggttaagccttttaaactcatggtagttattttcaagcattaacatgaacttaaattcatcaaggctaatctctatatttgccttgtgagttttcttttgtgttagttcttttaataaccactcataaatcctcatagagtatttgttttcaaaagacttaacatgttccagattatattttatgaatttttttaactggaaaagataaggcaatatctcttcactaaaaactaattctaatttttcgcttgagaacttggcatagtttgtccactggaaaatcttaaagcctttaaccaaaggattcctgatttccacagttctcgtcatcagctctctggttgctttagctaatacaccataagcattttccctactgatgttcatcatctgagcgtattggttataagtgaacgataccgtccgttctttccttgtagggttttcaatcgtggggttgagtagtgccacacagcataaaattagcttggtttcatgctccgttaagtcatagcgactaatcgctagttcatttgctttgaaaacaactaattcagacatacatctcaattggtctaggtgattttaatcactataccaattgagatgggctagtcaatgataattactagtccttttcctttgagttgtgggtatctgtaaattctgctagacctttgctggaaaacttgtaaattctgctagaccctctgtaaattccgctagacctttgtgtgttttttttgtttatattcaagtggttataatttatagaataaagaaagaataaaaaaagataaaaagaatagatcccagccctgtgtataactcactactttagtcagttccgcagtattacaaaaggatgtcgcaaacgctgtttgctcctctacaaaacagaccttaaaaccctaaaggcttaagtagcaccctcgcaagctcgggcaaatcgctgaatattccttttgtctccgaccatcaggcacctgagtcgctgtctttttcgtgacattcagttcgctgcgctcacggctctggcagtgaatgggggtaaatggcactacaggcgccttttatggattcatgcaaggaaactacccataatacaagaaaagcccgtcacgggcttctcagggcgttttatggcgggtctgctatgtggtgctatctgactttttgctgttcagcagttcctgccctctgattttccagtctgaccacttcggattatcccgtgacaggtcattcagactggctaatgcacccagtaaggcagcggtatcatcaacaggcttacccgtcttactgtcaagaggacatccggtcaaataaaacgaaaggctcagtcgaaagactgggcctttcgttttgctgaggagacttagggaccctttatgacaacttgacggctacatcattcactttttcttcacaaccggcacggaactcgctcgggctggccccggtgcattttttaaatacccgcgagaaatagagttgatcgtcaaaaccaacattgcgaccgacggtggcgataggcatccgggtggtgctcaaaagcagcttcgcctggctgatacgttggtcctcgcgccagcttaagacgctaatccctaactgctggcggaaaagatgtgacagacgcgacggcgacaagcaaacatgctgtgcgacgctggcgatatcaaaattgctgtctgccaggtgatcgctgatgtactgacaagcctcgcgtacccgattatccatcggtggatggagcgactcgttaatcgcttccatgcgccgcagtaacaattgctcaagcagatttatcgccagcagctccgaatagcgcccttccccttgcccggcgttaatgatttgcccaaacaggtcgctgaaatgcggctggtgcgcttcatccgggcgaaagaaccccgtattggcaaatattgacggccagttaagccattcatgccagtaggcgcgcggacgaaagtaaacccactggtgataccattcgcgagcctccggatgacgaccgtagtgatgaatctctcctggcgggaacagcaaaatatcacccggtcggcaaacaaattctcgtccctgatttttcaccaccccctgaccgcgaatggtgagattgagaatataacctttcattcccagcggtcggtcgataaaaaaatcgagataaccgttggcctcaatcggcgttaaacccgccaccagatgggcattaaacgagtatcccggcagcaggggatcattttgcgcttcagccatacttttcatactcccaccattcagagaagaaaccaattgtccatattgcatcagacattgccgtcactgcgtcttttactggctcttctcgctaacccaaccggtaaccccgcttattaaaagcattctgtaacaaagcgggaccaaagccatgacaaaaacgcgtaacaaaagtgtctataatcacggcagaaaagtccacattgattatttgcacggcgtcacactttgctatgccatagcatttttatccataagattagcggatcctacctgacgctttttatcgcaactctctactgtttctccatacccgttttacctgcaggtgcagtttctttcaggagattccaatatggcaaacagcgcacaagcacgcaaacgtgcccgccagtccgtcaaacaacgcgcccacaacgctagcctgcgtaccgcattccgcaccgcagtgaaaaaagtattgaaagcagtcgaagcaggcgataaagctgccgcacgagcggtttaccaagagtccgtcaaagtcatcgaccgcatcgccgacaaaggcgtgttccacaaaaacaaagcggctcgccacaaaagccgcctgtctgcaaaagtaaaagcactggcttgatttttgcattttctcaaaaggactcaaaatggtagttatccgtttggcacgcggcggctcgaaacaccgccccttctacaacgtcatcgttactgactcacgcagccgccgcgacggccgcttcatcgaacgcgtaggcttctacaaccccgtagccaacgaaaaacaagagcgcgtccgcctcaatgcagaccgcctgaaccactggattgcacaaggcgcgcaagtcagcgactccgttgcaaaactgattaaagaacaaaaagccgtctaatccgcgtttgtaccgaaaagagttatatatgtctatggaaaattttgctcagctgttggaagaaagctttaccctgcaagaaatgaacccgggtgaggtgattaccgctgaagtagtggcaatcgaccaaaacttcgttaccgtaaacgcaggtctgaaatcagaatccctgatcgatgtagctgaattcaaaaacgctcaaggcgaaattgaagttaaagtcggcgacttcgttaccgttaccatcgaatccgtcgaaaacggcttcggcgaaaccaaactgtcccgcgaaaaagccaaacgcgcagccgattggatcgctttggaagaagccatggaaaacggcaacatcctgtccggcatcatcaacggtaaagtcaaaggcggcctgaccgttatgatcagcagcatccgcgcattcctgccgggttctttggtcgacgtacgtcccgttaaagacacttcccattttgaaggcaaagagatcgaattcaaagtgatcaaactggacaaaaaacgcaacaacgtcgttgtttcccgccgcgccgttttggaagccactttgggtgaagaacgcaaagccctgctggaaaacctgcaagaaggctccgtcatcaaaggcatcgtcaaaaatatcaccgactacggcgcattcgttgacctgggcggcatcgacggcctgctgcacatcaccgatttggcatggcgtcgcgtgaaacacccgagcgaagtcttggaagtcggtcaggaagttgaagccaaagtattgaaattcgaccaagaaaaacaacgtgtttccttgggtatgaaacaactgggcgaagatccttggagcggtctgacccgccgttatccgcaagccacccgcctgttcggcaaagtatccaacctgaccgactacggcgcattcgtcgaaatcgaacaaggcatcgaaggtttggtacacgtctccgaaatggactggaccaacaaaaacgtacacccgagcaaagtcgtacaactgggtgacgaagtcgaagtcatgattttggaaatcgacgaaggccgccgccgtatctctttgggtatgaaacaatgccaagccaatccttgggaagaatttgccgccaaccacaacaaaggagacaaaatctccggtgcggttaaatccattaccgatttcggcgtattcgtcggcctgcccggcggcatcgacggtctggttcacctgtccgacctgtcttggaccgaatccggcgaagaagccgtacgcaaatacaaaaaaggagaagaagtcgaagccgtcgtattggcaatcgatgtggaaaaagaacgcatctccttgggtatcaaacaactggaaggcgatcctttcggcaacttcatcagcgtgaacgacaaaggttctttggttaaaggttccgtgaaatctgttgatgccaaaggcgctgttatcgccctgtctgacgaagtagaaggctacctgcctgcttccgaatttgcagccgaccgcgttgaagacttgaccaccaaactgaaagaaggcgatgaagttgaagccgtcatcgttaccgttgaccgcaaaaaccgcagcatcaaactttccgttaaagccaaagatgccaaagaaagccgcgaagcactgaactccgtcaatgccgccgccaatgcgaatgccggtaccaccagcttgggcgacctgctgaaagccaaactctccggcgaacaagaataaggttgcagtttttcggagtttttccattatggcactgaccgtagaacaaaaagcacaaatcgttaaagatttccaacgtaaagaaggcgacaccggctcttctgaagtacaagttgccctgttgactttccgcatcaacgatctgaccccccacttcaaagccaaccccaaagaccaccacagccgtcgcggcctgttgaaaatggtcagccaacgccgtcgcctgttggtctatttgcgccgtacccagcccgatacgtatcgcgcgttgattacccgcttgggtctgcgtaaataattgcgcttacttaattaacggcactcctcagccaagtcaaaagcctccggtcggaggcttttgactacatgcccatggcgtttacgccccgccctgccactcatcgcagtactgttgtaattcattaagcattctgccgacatggaagccatcacaaacggcatgatgaacctgaatcgccagcggcatcagcaccttgtcgccttgcgtataatatttgcccatagtgaaaacgggggcgaagaagttgtccatattggccacgtttaaatcaaaactggtgaaactcacccagggattggctgagacgaaaaacatattctcaataaaccctttagggaaataggccaggttttcaccgtaacacgccacatcttgcgaatatatgtgtagaaactgccggaaatcgtcgtggtattcactccagagcgatgaaaacgtttcagtttgctcatggaaaacggtgtaacaagggtgaacactatcccatatcaccagctcaccgtctttcattgccatacggaactccggatgagcattcatcaggcgggcaagaatgtgaataaaggccggataaaacttgtgcttatttttctttacggtctttaaaaaggccgtaatatccagctgaacggtctggttataggtacattgagcaactgactgaaatgcctcaaaatgttctttacgatgccattgggatatatcaacggtggtatatccagtgatttttttctccattttagcttccttagctcctgaaaatctcgataactcaaaaaatacgcccggtagtgatcttatttcattatggtgaaagttggaacctcttacgtgccaagccaaataggccgt

SEQ ID NO: 182 - DNA, 4424 bp, Artificial
  Synthetic
tcagatccttccgtatttagccagtatgttctctagtgtggttcgttgtttttgcgtgagccatgagaacgaaccattgagatcatgcttactttgcatgtcactcaaaaattttgcctcaaaactggtgagctgaatttttgcagttaaagcatcgtgtagtgtttttcttagtccgttacgtaggtaggaatctgatgtaatggttgttggtattttgtcaccattcatttttatctggttgttctcaagttcggttacgagatccatttgtctatctagttcaacttggaaaatcaacgtatcagtcgggcggcctcgcttatcaaccaccaatttcatattgctgtaagtgtttaaatctttacttattggtttcaaaacccattggttaagccttttaaactcatggtagttattttcaagcattaacatgaacttaaattcatcaaggctaatctctatatttgccttgtgagttttcttttgtgttagttcttttaataaccactcataaatcctcatagagtatttgttttcaaaagacttaacatgttccagattatattttatgaatttttttaactggaaaagataaggcaatatctcttcactaaaaactaattctaatttttcgcttgagaacttggcatagtttgtccactggaaaatcttaaagcctttaaccaaaggattcctgatttccacagttctcgtcatcagctctctggttgctttagctaatacaccataagcattttccctactgatgttcatcatctgagcgtattggttataagtgaacgataccgtccgttctttccttgtagggttttcaatcgtggggttgagtagtgccacacagcataaaattagcttggtttcatgctccgttaagtcatagcgactaatcgctagttcatttgctttgaaaacaactaattcagacatacatctcaattggtctaggtgattttaatcactataccaattgagatgggctagtcaatgataattactagtccttttcctttgagttgtgggtatctgtaaattctgctagacctttgctggaaaacttgtaaattctgctagaccctctgtaaattccgctagacctttgtgtgttttttttgtttatattcaagtggttataatttatagaataaagaaagaataaaaaaagataaaaagaatagatcccagccctgtgtataactcactactttagtcagttccgcagtattacaaaaggatgtcgcaaacgctgtttgctcctctacaaaacagaccttaaaaccctaaaggcttaagtagcaccctcgcaagctcgggcaaatcgctgaatattccttttgtctccgaccatcaggcacctgagtcgctgtctttttcgtgacattcagttcgctgcgctcacggctctggcagtgaatgggggtaaatggcactacaggcgccttttatggattcatgcaaggaaactacccataatacaagaaaagcccgtcacgggcttctcagggcgttttatggcgggtctgctatgtggtgctatctgactttttgctgttcagcagttcctgccctctgattttccagtctgaccacttcggattatcccgtgacaggtcattcagactggctaatgcacccagtaaggcagcggtatcatcaacaggcttacccgtcttactgtcaagaggacatccggtcaaataaaacgaaaggctcagtcgaaagactgggcctttcgttttgctgaggagacttagggaccctttatgacaacttgacggctacatcattcactttttcttcacaaccggcacggaactcgctcgggctggccccggtgcattttttaaatacccgcgagaaatagagttgatcgtcaaaaccaacattgcgaccgacggtggcgataggcatccgggtggtgctcaaaagcagcttcgcctggctgatacgttggtcctcgcgccagcttaagacgctaatccctaactgctggcggaaaagatgtgacagacgcgacggcgacaagcaaacatgctgtgcgacgctggcgatatcaaaattgctgtctgccaggtgatcgctgatgtactgacaagcctcgcgtacccgattatccatcggtggatggagcgactcgttaatcgcttccatgcgccgcagtaacaattgctcaagcagatttatcgccagcagctccgaatagcgcccttccccttgcccggcgttaatgatttgcccaaacaggtcgctgaaatgcggctggtgcgcttcatccgggcgaaagaaccccgtattggcaaatattgacggccagttaagccattcatgccagtaggcgcgcggacgaaagtaaacccactggtgataccattcgcgagcctccggatgacgaccgtagtgatgaatctctcctggcgggaacagcaaaatatcacccggtcggcaaacaaattctcgtccctgatttttcaccaccccctgaccgcgaatggtgagattgagaatataacctttcattcccagcggtcggtcgataaaaaaatcgagataaccgttggcctcaatcggcgttaaacccgccaccagatgggcattaaacgagtatcccggcagcaggggatcattttgcgcttcagccatacttttcatactcccaccattcagagaagaaaccaattgtccatattgcatcagacattgccgtcactgcgtcttttactggctcttctcgctaacccaaccggtaaccccgcttattaaaagcattctgtaacaaagcgggaccaaagccatgacaaaaacgcgtaacaaaagtgtctataatcacggcagaaaagtccacattgattatttgcacggcgtcacactttgctatgccatagcatttttatccataagattagcggatcctacctgacgctttttatcgcaactctctactgtttctccatacccgttttacctgcaggtgcagtattcatactagctaagcaacatggccaataccgcccaagcccgcaagcgcgctcgccaatcggtccagcgcaacaagcacaactccagcctgcgctcgatgctgcgcaccgccatcaagcgcgttcgccaatccatcgccactggcgataaggctgctgctggcgaaacgctgcgtaaagccacgagcgtgattgacagcgtggctgacaagaacatcatccacaagaacaaggctgctcgccacaagagccgcctggctgccgccgtcaaggcgctggcctaaagcaagtaaccaattcaagggattacctatgctggtgattcgtctggcccgcggtggctcgaagaagcgtccgttttacaacctggtagctaccgattcgcgcaatcgtcgcgatggccgtttcgtcgagcgcgttggcttttacaacccggttgccgctgaaggcaccgagaatctgcgcatcgccctggaccgcgtgcaatactggaccggcaacggcgcgctgctgtcgcccgccgtcgagcgcctggtcaaggaatactcggccaaggtttcggctgctgcctgagcccgctgacttaattaacggcactcctcagccaagtcaaaagcctccggtcggaggcttttgactacatgcccatggcgtttacgccccgccctgccactcatcgcagtactgttgtaattcattaagcattctgccgacatggaagccatcacaaacggcatgatgaacctgaatcgccagcggcatcagcaccttgtcgccttgcgtataatatttgcccatagtgaaaacgggggcgaagaagttgtccatattggccacgtttaaatcaaaactggtgaaactcacccagggattggctgagacgaaaaacatattctcaataaaccctttagggaaataggccaggttttcaccgtaacacgccacatcttgcgaatatatgtgtagaaactgccggaaatcgtcgtggtattcactccagagcgatgaaaacgtttcagtttgctcatggaaaacggtgtaacaagggtgaacactatcccatatcaccagctcaccgtctttcattgccatacggaactccggatgagcattcatcaggcgggcaagaatgtgaataaaggccggataaaacttgtgcttatttttctttacggtctttaaaaaggccgtaatatccagctgaacggtctggttataggtacattgagcaactgactgaaatgcctcaaaatgttctttacgatgccattgggatatatcaacggtggtatatccagtgatttttttctccattttagcttccttagctcctgaaaatctcgataactcaaaaaatacgcccggtagtgatcttatttcattatggtgaaagttggaacctcttacgtgccaagccaaataggccgt

SEQ ID NO: 183 - DNA, 6466 bp, Artificial
  Synthetic
tcagatccttccgtatttagccagtatgttctctagtgtggttcgttgtttttgcgtgagccatgagaacgaaccattgagatcatgcttactttgcatgtcactcaaaaattttgcctcaaaactggtgagctgaatttttgcagttaaagcatcgtgtagtgtttttcttagtccgttacgtaggtaggaatctgatgtaatggttgttggtattttgtcaccattcatttttatctggttgttctcaagttcggttacgagatccatttgtctatctagttcaacttggaaaatcaacgtatcagtcgggcggcctcgcttatcaaccaccaatttcatattgctgtaagtgtttaaatctttacttattggtttcaaaacccattggttaagccttttaaactcatggtagttattttcaagcattaacatgaacttaaattcatcaaggctaatctctatatttgccttgtgagttttcttttgtgttagttcttttaataaccactcataaatcctcatagagtatttgttttcaaaagacttaacatgttccagattatattttatgaatttttttaactggaaaagataaggcaatatctcttcactaaaaactaattctaatttttcgcttgagaacttggcatagtttgtccactggaaaatcttaaagcctttaaccaaaggattcctgatttccacagttctcgtcatcagctctctggttgctttagctaatacaccataagcattttccctactgatgttcatcatctgagcgtattggttataagtgaacgataccgtccgttctttccttgtagggttttcaatcgtggggttgagtagtgccacacagcataaaattagcttggtttcatgctccgttaagtcatagcgactaatcgctagttcatttgctttgaaaacaactaattcagacatacatctcaattggtctaggtgattttaatcactataccaattgagatgggctagtcaatgataattactagtccttttcctttgagttgtgggtatctgtaaattctgctagacctttgctggaaaacttgtaaattctgctagaccctctgtaaattccgctagacctttgtgtgttttttttgtttatattcaagtggttataatttatagaataaagaaagaataaaaaaagataaaaagaatagatcccagccctgtgtataactcactactttagtcagttccgcagtattacaaaaggatgtcgcaaacgctgtttgctcctctacaaaacagaccttaaaaccctaaaggcttaagtagcaccctcgcaagctcgggcaaatcgctgaatattccttttgtctccgaccatcaggcacctgagtcgctgtctttttcgtgacattcagttcgctgcgctcacggctctggcagtgaatgggggtaaatggcactacaggcgccttttatggattcatgcaaggaaactacccataatacaagaaaagcccgtcacgggcttctcagggcgttttatggcgggtctgctatgtggtgctatctgactttttgctgttcagcagttcctgccctctgattttccagtctgaccacttcggattatcccgtgacaggtcattcagactggctaatgcacccagtaaggcagcggtatcatcaacaggcttacccgtcttactgtcaagaggacatccggtcaaataaaacgaaaggctcagtcgaaagactgggcctttcgttttgctgaggagacttagggaccctttatgacaacttgacggctacatcattcactttttcttcacaaccggcacggaactcgctcgggctggccccggtgcattttttaaatacccgcgagaaatagagttgatcgtcaaaaccaacattgcgaccgacggtggcgataggcatccgggtggtgctcaaaagcagcttcgcctggctgatacgttggtcctcgcgccagcttaagacgctaatccctaactgctggcggaaaagatgtgacagacgcgacggcgacaagcaaacatgctgtgcgacgctggcgatatcaaaattgctgtctgccaggtgatcgctgatgtactgacaagcctcgcgtacccgattatccatcggtggatggagcgactcgttaatcgcttccatgcgccgcagtaacaattgctcaagcagatttatcgccagcagctccgaatagcgcccttccccttgcccggcgttaatgatttgcccaaacaggtcgctgaaatgcggctggtgcgcttcatccgggcgaaagaaccccgtattggcaaatattgacggccagttaagccattcatgccagtaggcgcgcggacgaaagtaaacccactggtgataccattcgcgagcctccggatgacgaccgtagtgatgaatctctcctggcgggaacagcaaaatatcacccggtcggcaaacaaattctcgtccctgatttttcaccaccccctgaccgcgaatggtgagattgagaatataacctttcattcccagcggtcggtcgataaaaaaatcgagataaccgttggcctcaatcggcgttaaacccgccaccagatgggcattaaacgagtatcccggcagcaggggatcattttgcgcttcagccatacttttcatactcccaccattcagagaagaaaccaattgtccatattgcatcagacattgccgtcactgcgtcttttactggctcttctcgctaacccaaccggtaaccccgcttattaaaagcattctgtaacaaagcgggaccaaagccatgacaaaaacgcgtaacaaaagtgtctataatcacggcagaaaagtccacattgattatttgcacggcgtcacactttgctatgccatagcatttttatccataagattagcggatcctacctgacgctttttatcgcaactctctactgtttctccatacccgttttacctgcaggtgcagtattcatactagctaagcaacatggccaataccgcccaagcccgcaagcgcgctcgccaatcggtccagcgcaacaagcacaactccagcctgcgctcgatgctgcgcaccgccatcaagcgcgttcgccaatccatcgccactggcgataaggctgctgctggcgaaacgctgcgtaaagccacgagcgtgattgacagcgtggctgacaagaacatcatccacaagaacaaggctgctcgccacaagagccgcctggctgccgccgtcaaggcgctggcctaaagcaagtaaccaattcaagggattacctatgctggtgattcgtctggcccgcggtggctcgaagaagcgtccgttttacaacctggtagctaccgattcgcgcaatcgtcgcgatggccgtttcgtcgagcgcgttggcttttacaacccggttgccgctgaaggcaccgagaatctgcgcatcgccctggaccgcgtgcaatactggaccggcaacggcgcgctgctgtcgcccgccgtcgagcgcctggtcaaggaatactcggccaaggtttcggctgctgcctgagcccgctggccaaatggattccaacctaatgtcttccgtttccacctccgccatccttggcggcgaaaacttcgccgacctgttcgcagaaagcctcaagagccaggacatgaagtccggcgaggtcatcagcgcagaagtcgtgcgcgtcgaccacaacttcgtggtcgtcaacgccggcctgaagtccgaagcgctgattcccctggaagagttcctcaacgaccagggcgaactcgaagttcaacccggcgacttcgtctcggtggcgatcgattcgctggagaacggctacggcgacaccatcctgtcgcgcgaccgcgccaagcgtctgtcggcctggctgcaactggagcaggccctcgagaacggcgagctggtcaccggcacgatcaccggcaaggtcaagggcggcctgaccgtcatgaccaacggcatccgcgcgttcctgcccggttcgctggtcgacctgcgtccggtcaaggacaccacgccgtacgaaggcaagaccctcgaattcaaggtcatcaagctggaccgcaagcgcaacaacgtcgtgctgtcgcgccgccaggtgctggaagccagcatgggcgaagagcgccagaagctgctcgagacgctgcacgaaggcgcggtggtcaagggcgtggtcaagaacatcaccgactacggcgcgttcgtcgacctgggcggcatcgatggcctgctgcacatcaccgacatggcctggcgccgtgtgcgtcacccgtccgaagtcctgcaagtgggtcaggaagtcgaagccaaggtgctcaagttcgaccaggaaaagagccgcgtctccctgggcgtcaagcagctgggcgaagatccgtgggtgggcctggctcgccgctacccgcagggcacccgcctgttcggcaaggtcaccaacctgaccgactacggcgcgttcgtcgaagtcgaagccggcatcgaaggcctggtgcacgtgtccgaaatggactggaccaacaagaacgtcgatccgcgcaaggtcgtgaccctgggcgaagaagtcgaagtcatggtcctggaaatcgacgaagaccgtcgccgcatttcgctgggcatgaagcagtgccgccagaacccgtgggaagagttcgccaccaacttcaagcgtggtgacaaggtccgcggcgccatcaagtcgatcaccgacttcggcgtgttcgtcggcctgcccggcggcatcgacggcctggtccatctgtccgacctgtcgtggacggaatcgggcgaggaagccgtgcgcaacttcaagaagggcgacgagctggaagccgtggtgctgggcatcgataccgagaaagagcgcatctcgctgggtatcaagcagctcgaaggcgacccgttcaacaacttcgttgccacgcacgacaagggcgccgttgttccgggcaccatcaagtcggtcgagcccaagggcgccgtgatcaccctgtcggtggatgtggaaggctacctgcgcgcctccgagatctcctcgggccgcgtcgaagacgctaccaccgtgctgaaggctggcgagaacatcgaagccatgatcgtcaacatcgaccgcaaggcgcgttcgatccagctgtcgatcaaggcccgcgataacgccgagacggccgagaccatccagcgcatgtccgaggcgagcgcttcgtcgggtacgacgaacttgggcgcgctgctcaaggccaagctggaccaacagcgcaacgacggttgacgtgaccaatgtccgtagaggtcatcaaatgtctgtagctgacatcaaaaaatccgaaatcgtcgcgcaattccaacgcgctcaaggcgataccggctcccctgaagttcaggtggcactgcttaccgctcgcatcaacgaactgaccggtcacttcaaagaacacatgaaggaccaccactcgcgccgcggcctgctgcgcatggtcagccgtcgtcgcaagctgctcgactatctcaagggccgcaatcccgattcgtaccgcgcactgatcgaaaaactcggtctgcgcaagtgatcgacgagacttaattaacggcactcctcagccaagtcaaaagcctccggtcggaggcttttgactacatgcccatggcgtttacgccccgccctgccactcatcgcagtactgttgtaattcattaagcattctgccgacatggaagccatcacaaacggcatgatgaacctgaatcgccagcggcatcagcaccttgtcgccttgcgtataatatttgcccatagtgaaaacgggggcgaagaagttgtccatattggccacgtttaaatcaaaactggtgaaactcacccagggattggctgagacgaaaaacatattctcaataaaccctttagggaaataggccaggttttcaccgtaacacgccacatcttgcgaatatatgtgtagaaactgccggaaatcgtcgtggtattcactccagagcgatgaaaacgtttcagtttgctcatggaaaacggtgtaacaagggtgaacactatcccatatcaccagctcaccgtctttcattgccatacggaactccggatgagcattcatcaggcgggcaagaatgtgaataaaggccggataaaacttgtgcttatttttctttacggtctttaaaaaggccgtaatatccagctgaacggtctggttataggtacattgagcaactgactgaaatgcctcaaaatgttctttacgatgccattgggatatatcaacggtggtatatccagtgatttttttctccattttagcttccttagctcctgaaaatctcgataactcaaaaaatacgcccggtagtgatcttatttcattatggtgaaagttggaacctcttacgtgccaagccaaataggccgt

SEQ ID NO: 184 - DNA, 4132 bp, Artificial
  Synthetic
tcagatccttccgtatttagccagtatgttctctagtgtggttcgttgtttttgcgtgagccatgagaacgaaccattgagatcatgcttactttgcatgtcactcaaaaattttgcctcaaaactggtgagctgaatttttgcagttaaagcatcgtgtagtgtttttcttagtccgttacgtaggtaggaatctgatgtaatggttgttggtattttgtcaccattcatttttatctggttgttctcaagttcggttacgagatccatttgtctatctagttcaacttggaaaatcaacgtatcagtcgggcggcctcgcttatcaaccaccaatttcatattgctgtaagtgtttaaatctttacttattggtttcaaaacccattggttaagccttttaaactcatggtagttattttcaagcattaacatgaacttaaattcatcaaggctaatctctatatttgccttgtgagttttcttttgtgttagttcttttaataaccactcataaatcctcatagagtatttgttttcaaaagacttaacatgttccagattatattttatgaatttttttaactggaaaagataaggcaatatctcttcactaaaaactaattctaatttttcgcttgagaacttggcatagtttgtccactggaaaatcttaaagcctttaaccaaaggattcctgatttccacagttctcgtcatcagctctctggttgctttagctaatacaccataagcattttccctactgatgttcatcatctgagcgtattggttataagtgaacgataccgtccgttctttccttgtagggttttcaatcgtggggttgagtagtgccacacagcataaaattagcttggtttcatgctccgttaagtcatagcgactaatcgctagttcatttgctttgaaaacaactaattcagacatacatctcaattggtctaggtgattttaatcactataccaattgagatgggctagtcaatgataattactagtccttttcctttgagttgtgggtatctgtaaattctgctagacctttgctggaaaacttgtaaattctgctagaccctctgtaaattccgctagacctttgtgtgttttttttgtttatattcaagtggttataatttatagaataaagaaagaataaaaaaagataaaaagaatagatcccagccctgtgtataactcactactttagtcagttccgcagtattacaaaaggatgtcgcaaacgctgtttgctcctctacaaaacagaccttaaaaccctaaaggcttaagtagcaccctcgcaagctcgggcaaatcgctgaatattccttttgtctccgaccatcaggcacctgagtcgctgtctttttcgtgacattcagttcgctgcgctcacggctctggcagtgaatgggggtaaatggcactacaggcgccttttatggattcatgcaaggaaactacccataatacaagaaaagcccgtcacgggcttctcagggcgttttatggcgggtctgctatgtggtgctatctgactttttgctgttcagcagttcctgccctctgattttccagtctgaccacttcggattatcccgtgacaggtcattcagactggctaatgcacccagtaaggcagcggtatcatcaacaggcttacccgtcttactgtcaagaggacatccggtcaaataaaacgaaaggctcagtcgaaagactgggcctttcgttttgctgaggagacttagggaccctttatgacaacttgacggctacatcattcactttttcttcacaaccggcacggaactcgctcgggctggccccggtgcattttttaaatacccgcgagaaatagagttgatcgtcaaaaccaacattgcgaccgacggtggcgataggcatccgggtggtgctcaaaagcagcttcgcctggctgatacgttggtcctcgcgccagcttaagacgctaatccctaactgctggcggaaaagatgtgacagacgcgacggcgacaagcaaacatgctgtgcgacgctggcgatatcaaaattgctgtctgccaggtgatcgctgatgtactgacaagcctcgcgtacccgattatccatcggtggatggagcgactcgttaatcgcttccatgcgccgcagtaacaattgctcaagcagatttatcgccagcagctccgaatagcgcccttccccttgcccggcgttaatgatttgcccaaacaggtcgctgaaatgcggctggtgcgcttcatccgggcgaaagaaccccgtattggcaaatattgacggccagttaagccattcatgccagtaggcgcgcggacgaaagtaaacccactggtgataccattcgcgagcctccggatgacgaccgtagtgatgaatctctcctggcgggaacagcaaaatatcacccggtcggcaaacaaattctcgtccctgatttttcaccaccccctgaccgcgaatggtgagattgagaatataacctttcattcccagcggtcggtcgataaaaaaatcgagataaccgttggcctcaatcggcgttaaacccgccaccagatgggcattaaacgagtatcccggcagcaggggatcattttgcgcttcagccatacttttcatactcccaccattcagagaagaaaccaattgtccatattgcatcagacattgccgtcactgcgtcttttactggctcttctcgctaacccaaccggtaaccccgcttattaaaagcattctgtaacaaagcgggaccaaagccatgacaaaaacgcgtaacaaaagtgtctataatcacggcagaaaagtccacattgattatttgcacggcgtcacactttgctatgccatagcatttttatccataagattagcggatcctacctgacgctttttatcgcaactctctactgtttctccatacccgttttacctgcaggtgcagtacacaataaagggattatcaatggtggtaattcgcttggcccgtggtggctccaaaaagcgtcctttttacaacgtagtagccgccgaggcgagccaacgccgtgatggtcgcttcatcgaacgtctgggtttctacaaccccgtcgctggcgaaggtcatgaaaacctgcgtctgcaaatggaccgcgttaagcacttcaccgacaacggtgctcaggtttcgcctgctgtggctcgcctgttgaaagaatactcggctaaggttgcttcggctgcctaagttgattcacttaattaacggcactcctcagccaagtcaaaagcctccggtcggaggcttttgactacatgcccatggcgtttacgccccgccctgccactcatcgcagtactgttgtaattcattaagcattctgccgacatggaagccatcacaaacggcatgatgaacctgaatcgccagcggcatcagcaccttgtcgccttgcgtataatatttgcccatagtgaaaacgggggcgaagaagttgtccatattggccacgtttaaatcaaaactggtgaaactcacccagggattggctgagacgaaaaacatattctcaataaaccctttagggaaataggccaggttttcaccgtaacacgccacatcttgcgaatatatgtgtagaaactgccggaaatcgtcgtggtattcactccagagcgatgaaaacgtttcagtttgctcatggaaaacggtgtaacaagggtgaacactatcccatatcaccagctcaccgtctttcattgccatacggaactccggatgagcattcatcaggcgggcaagaatgtgaataaaggccggataaaacttgtgcttatttttctttacggtctttaaaaaggccgtaatatccagctgaacggtctggttataggtacattgagcaactgactgaaatgcctcaaaatgttctttacgatgccattgggatatatcaacggtggtatatccagtgatttttttctccattttagcttccttagctcctgaaaatctcgataactcaaaaaatacgcccggtagtgatcttatttcattatggtgaaagttggaacctcttacgtgccaagccaaataggccgt

SEQ ID NO: 185 - DNA, 4424 bp, Artificial
  Synthetic
tcagatccttccgtatttagccagtatgttctctagtgtggttcgttgtttttgcgtgagccatgagaacgaaccattgagatcatgcttactttgcatgtcactcaaaaattttgcctcaaaactggtgagctgaatttttgcagttaaagcatcgtgtagtgtttttcttagtccgttacgtaggtaggaatctgatgtaatggttgttggtattttgtcaccattcatttttatctggttgttctcaagttcggttacgagatccatttgtctatctagttcaacttggaaaatcaacgtatcagtcgggcggcctcgcttatcaaccaccaatttcatattgctgtaagtgtttaaatctttacttattggtttcaaaacccattggttaagccttttaaactcatggtagttattttcaagcattaacatgaacttaaattcatcaaggctaatctctatatttgccttgtgagttttcttttgtgttagttcttttaataaccactcataaatcctcatagagtatttgttttcaaaagacttaacatgttccagattatattttatgaatttttttaactggaaaagataaggcaatatctcttcactaaaaactaattctaatttttcgcttgagaacttggcatagtttgtccactggaaaatcttaaagcctttaaccaaaggattcctgatttccacagttctcgtcatcagctctctggttgctttagctaatacaccataagcattttccctactgatgttcatcatctgagcgtattggttataagtgaacgataccgtccgttctttccttgtagggttttcaatcgtggggttgagtagtgccacacagcataaaattagcttggtttcatgctccgttaagtcatagcgactaatcgctagttcatttgctttgaaaacaactaattcagacatacatctcaattggtctaggtgattttaatcactataccaattgagatgggctagtcaatgataattactagtccttttcctttgagttgtgggtatctgtaaattctgctagacctttgctggaaaacttgtaaattctgctagaccctctgtaaattccgctagacctttgtgtgttttttttgtttatattcaagtggttataatttatagaataaagaaagaataaaaaaagataaaaagaatagatcccagccctgtgtataactcactactttagtcagttccgcagtattacaaaaggatgtcgcaaacgctgtttgctcctctacaaaacagaccttaaaaccctaaaggcttaagtagcaccctcgcaagctcgggcaaatcgctgaatattccttttgtctccgaccatcaggcacctgagtcgctgtctttttcgtgacattcagttcgctgcgctcacggctctggcagtgaatgggggtaaatggcactacaggcgccttttatggattcatgcaaggaaactacccataatacaagaaaagcccgtcacgggcttctcagggcgttttatggcgggtctgctatgtggtgctatctgactttttgctgttcagcagttcctgccctctgattttccagtctgaccacttcggattatcccgtgacaggtcattcagactggctaatgcacccagtaaggcagcggtatcatcaacaggcttacccgtcttactgtcaagaggacatccggtcaaataaaacgaaaggctcagtcgaaagactgggcctttcgttttgctgaggagacttagggaccctttatgacaacttgacggctacatcattcactttttcttcacaaccggcacggaactcgctcgggctggccccggtgcattttttaaatacccgcgagaaatagagttgatcgtcaaaaccaacattgcgaccgacggtggcgataggcatccgggtggtgctcaaaagcagcttcgcctggctgatacgttggtcctcgcgccagcttaagacgctaatccctaactgctggcggaaaagatgtgacagacgcgacggcgacaagcaaacatgctgtgcgacgctggcgatatcaaaattgctgtctgccaggtgatcgctgatgtactgacaagcctcgcgtacccgattatccatcggtggatggagcgactcgttaatcgcttccatgcgccgcagtaacaattgctcaagcagatttatcgccagcagctccgaatagcgcccttccccttgcccggcgttaatgatttgcccaaacaggtcgctgaaatgcggctggtgcgcttcatccgggcgaaagaaccccgtattggcaaatattgacggccagttaagccattcatgccagtaggcgcgcggacgaaagtaaacccactggtgataccattcgcgagcctccggatgacgaccgtagtgatgaatctctcctggcgggaacagcaaaatatcacccggtcggcaaacaaattctcgtccctgatttttcaccaccccctgaccgcgaatggtgagattgagaatataacctttcattcccagcggtcggtcgataaaaaaatcgagataaccgttggcctcaatcggcgttaaacccgccaccagatgggcattaaacgagtatcccggcagcaggggatcattttgcgcttcagccatacttttcatactcccaccattcagagaagaaaccaattgtccatattgcatcagacattgccgtcactgcgtcttttactggctcttctcgctaacccaaccggtaaccccgcttattaaaagcattctgtaacaaagcgggaccaaagccatgacaaaaacgcgtaacaaaagtgtctataatcacggcagaaaagtccacattgattatttgcacggcgtcacactttgctatgccatagcatttttatccataagattagcggatcctacctgacgctttttatcgcaactctctactgtttctccatacccgttttacctgcaggtgcagtaaacttaggctttattaaaaatggctaataccgcacaagcacgcaagcgcgcccgccaagcagtggctcgcaacaaacacaacgccagcatccgttccatgctgcgtaccgctatcaagcgcgttcgccaggctatcgaagccggtgacaaaactgctgctaacgaagttttccgcaaagcgaccagcatcattgatcgcgttgccgacaagaacatcattcacaagaacaaggctgcccgccacaagagccgcctgtctgctgctatcaaggccctggcctgattgctgaaacacaataaagggattatcaatggtggtaattcgcttggcccgtggtggctccaaaaagcgtcctttttacaacgtagtagccgccgaggcgagccaacgccgtgatggtcgcttcatcgaacgtctgggtttctacaaccccgtcgctggcgaaggtcatgaaaacctgcgtctgcaaatggaccgcgttaagcacttcaccgacaacggtgctcaggtttcgcctgctgtggctcgcctgttgaaagaatactcggctaaggttgcttcggctgcctaagttgattcacttaattaacggcactcctcagccaagtcaaaagcctccggtcggaggcttttgactacatgcccatggcgtttacgccccgccctgccactcatcgcagtactgttgtaattcattaagcattctgccgacatggaagccatcacaaacggcatgatgaacctgaatcgccagcggcatcagcaccttgtcgccttgcgtataatatttgcccatagtgaaaacgggggcgaagaagttgtccatattggccacgtttaaatcaaaactggtgaaactcacccagggattggctgagacgaaaaacatattctcaataaaccctttagggaaataggccaggttttcaccgtaacacgccacatcttgcgaatatatgtgtagaaactgccggaaatcgtcgtggtattcactccagagcgatgaaaacgtttcagtttgctcatggaaaacggtgtaacaagggtgaacactatcccatatcaccagctcaccgtctttcattgccatacggaactccggatgagcattcatcaggcgggcaagaatgtgaataaaggccggataaaacttgtgcttatttttctttacggtctttaaaaaggccgtaatatccagctgaacggtctggttataggtacattgagcaactgactgaaatgcctcaaaatgttctttacgatgccattgggatatatcaacggtggtatatccagtgatttttttctccattttagcttccttagctcctgaaaatctcgataactcaaaaaatacgcccggtagtgatcttatttcattatggtgaaagttggaacctcttacgtgccaagccaaataggccgt

SEQ ID NO: 186 - DNA, 6469 bp, Artificial
  Synthetic
tcagatccttccgtatttagccagtatgttctctagtgtggttcgttgtttttgcgtgagccatgagaacgaaccattgagatcatgcttactttgcatgtcactcaaaaattttgcctcaaaactggtgagctgaatttttgcagttaaagcatcgtgtagtgtttttcttagtccgttacgtaggtaggaatctgatgtaatggttgttggtattttgtcaccattcatttttatctggttgttctcaagttcggttacgagatccatttgtctatctagttcaacttggaaaatcaacgtatcagtcgggcggcctcgcttatcaaccaccaatttcatattgctgtaagtgtttaaatctttacttattggtttcaaaacccattggttaagccttttaaactcatggtagttattttcaagcattaacatgaacttaaattcatcaaggctaatctctatatttgccttgtgagttttcttttgtgttagttcttttaataaccactcataaatcctcatagagtatttgttttcaaaagacttaacatgttccagattatattttatgaatttttttaactggaaaagataaggcaatatctcttcactaaaaactaattctaatttttcgcttgagaacttggcatagtttgtccactggaaaatcttaaagcctttaaccaaaggattcctgatttccacagttctcgtcatcagctctctggttgctttagctaatacaccataagcattttccctactgatgttcatcatctgagcgtattggttataagtgaacgataccgtccgttctttccttgtagggttttcaatcgtggggttgagtagtgccacacagcataaaattagcttggtttcatgctccgttaagtcatagcgactaatcgctagttcatttgctttgaaaacaactaattcagacatacatctcaattggtctaggtgattttaatcactataccaattgagatgggctagtcaatgataattactagtccttttcctttgagttgtgggtatctgtaaattctgctagacctttgctggaaaacttgtaaattctgctagaccctctgtaaattccgctagacctttgtgtgttttttttgtttatattcaagtggttataatttatagaataaagaaagaataaaaaaagataaaaagaatagatcccagccctgtgtataactcactactttagtcagttccgcagtattacaaaaggatgtcgcaaacgctgtttgctcctctacaaaacagaccttaaaaccctaaaggcttaagtagcaccctcgcaagctcgggcaaatcgctgaatattccttttgtctccgaccatcaggcacctgagtcgctgtctttttcgtgacattcagttcgctgcgctcacggctctggcagtgaatgggggtaaatggcactacaggcgccttttatggattcatgcaaggaaactacccataatacaagaaaagcccgtcacgggcttctcagggcgttttatggcgggtctgctatgtggtgctatctgactttttgctgttcagcagttcctgccctctgattttccagtctgaccacttcggattatcccgtgacaggtcattcagactggctaatgcacccagtaaggcagcggtatcatcaacaggcttacccgtcttactgtcaagaggacatccggtcaaataaaacgaaaggctcagtcgaaagactgggcctttcgttttgctgaggagacttagggaccctttatgacaacttgacggctacatcattcactttttcttcacaaccggcacggaactcgctcgggctggccccggtgcattttttaaatacccgcgagaaatagagttgatcgtcaaaaccaacattgcgaccgacggtggcgataggcatccgggtggtgctcaaaagcagcttcgcctggctgatacgttggtcctcgcgccagcttaagacgctaatccctaactgctggcggaaaagatgtgacagacgcgacggcgacaagcaaacatgctgtgcgacgctggcgatatcaaaattgctgtctgccaggtgatcgctgatgtactgacaagcctcgcgtacccgattatccatcggtggatggagcgactcgttaatcgcttccatgcgccgcagtaacaattgctcaagcagatttatcgccagcagctccgaatagcgcccttccccttgcccggcgttaatgatttgcccaaacaggtcgctgaaatgcggctggtgcgcttcatccgggcgaaagaaccccgtattggcaaatattgacggccagttaagccattcatgccagtaggcgcgcggacgaaagtaaacccactggtgataccattcgcgagcctccggatgacgaccgtagtgatgaatctctcctggcgggaacagcaaaatatcacccggtcggcaaacaaattctcgtccctgatttttcaccaccccctgaccgcgaatggtgagattgagaatataacctttcattcccagcggtcggtcgataaaaaaatcgagataaccgttggcctcaatcggcgttaaacccgccaccagatgggcattaaacgagtatcccggcagcaggggatcattttgcgcttcagccatacttttcatactcccaccattcagagaagaaaccaattgtccatattgcatcagacattgccgtcactgcgtcttttactggctcttctcgctaacccaaccggtaaccccgcttattaaaagcattctgtaacaaagcgggaccaaagccatgacaaaaacgcgtaacaaaagtgtctataatcacggcagaaaagtccacattgattatttgcacggcgtcacactttgctatgccatagcatttttatccataagattagcggatcctacctgacgctttttatcgcaactctctactgtttctccatacccgttttacctgcaggtgcagtaaacttaggctttattaaaaatggctaataccgcacaagcacgcaagcgcgcccgccaagcagtggctcgcaacaaacacaacgccagcatccgttccatgctgcgtaccgctatcaagcgcgttcgccaggctatcgaagccggtgacaaaactgctgctaacgaagttttccgcaaagcgaccagcatcattgatcgcgttgccgacaagaacatcattcacaagaacaaggctgcccgccacaagagccgcctgtctgctgctatcaaggccctggcctgattgctgaaacacaataaagggattatcaatggtggtaattcgcttggcccgtggtggctccaaaaagcgtcctttttacaacgtagtagccgccgaggcgagccaacgccgtgatggtcgcttcatcgaacgtctgggtttctacaaccccgtcgctggcgaaggtcatgaaaacctgcgtctgcaaatggaccgcgttaagcacttcaccgacaacggtgctcaggtttcgcctgctgtggctcgcctgttgaaagaatactcggctaaggttgcttcggctgcctaagttgattcttggctaacggattgatttaatgtccactaaccttcacacagacgcaacgggcggcgaaagctttgccgatttgtttgcagaaagcattaaaaaccaagacctgaaaagcggcgaagttatctccgccgaggttctgcgtattgaccacaactacgttctggtcaatgctggcctgaagtccgaagcactgatccctctggaagagttcctgaacgatcagggcgagctggaagttcaagctggtgactttgtttccgtggcaatcgacgcctttgaaaacggctacggcgacaccatcctgtcccgcgaccgcgccaagcgtctgtcggcctggttgtccctcgagcaagcgcttgagtccggcgaactggtcaacggtaccatcactggtaaggtcaagggcggtctgactgtcatgaccaacggcatccgtgcattcttgcccggttcgctggttgatctgcgtcctgtcaaggacaccacgccatacgaaggcaagaccctggaattcaaggttatcaagctcgatcgcaagcgtaacaacgtcgtgttgtcgcgtcgcgctgtgctggaagcctccatgggcgaagagcgtcagaaactgctggaaaccctgtccgaaggcgctatcgtcaaaggtatcgtcaagaatatcaccgattacggtgcgttcgtggatctgggcggcatcgacggtctgctgcacatcaccgacatggcatggcgccgtgttcgtcacccatccgaagttctgcaggtgggtcaggaaatcgaagccaaggtcctcaagttcgatcaggaaaagagccgcgtctccctgggcgtcaagcagctgggcgaagatccatggatcggtctggcacgtcgctacccacaaaacacccgtttgttcggcaaggttaccaacctgaccgactacggtgcatttgttgaagtggaagacggtatcgaaggtctggttcacgtatccgaaatggattggaccaacaagaacgttgacccacgcaaggttgtgaccttgggtgaagaagtcgaagtcatggttctggaaatcgacgaagatcgtcgtcgtatctccttgggcatgaagcagtgccgtgccaacccatgggaagatttcgccatcaacttcaagcgcggcgacaaggttcgcggtggcatcaagtccatcaccgacttcggcgtgtttgttggtctgccaggcggcatcgacggtctggttcacctgtccgacctgtcctggtccgagactggcgaagaagccgttcgcaacttcaagaagggcgacgaagttgacgccgtggttctgggcatcgacaccgacaaagagcgcatttccctgggtatcaaacagctggaaggcgatccgttcaacaacttcgtagctacctacgacaagggtgctgtagttagcggcgtcgtcaagtcggtagaagccaagggtgctgttgttactctgtcgctggacgttgaaggctacctgcgcgcctccgagatctcctcgggtcgtgttgaagatgccacgacggctctgaaagaaggtcaggaaatcgaaaccatgatcttgagcgtggatcgcaagacccgttcgattcagttgtccatcaaggctcgtgataccgccgaaaccgctcaatccatggcccgcctgaccgaagccagcgcttcgtccggtacgaccaatctgggtgctctgctgcgtgccaagctggaccagcagcaacgtgacgacggttaatcagcgtgagtcttagaggctaaataaaatggcagttgcagatatcaaaaaagtcgatatcgtttccgagtttcagcgtaaacaaggcgatacaggctccccagaagtgcaagtggctttgctgaccgctcgcatcaacgaattgaccggccacttcaaggctcacaacaaggatcaccactcccgtcgtggtctgttgcgcatggttagccgtcgtcgcaaattgctggattacctgaaaggtcgtaatccagacgcttaccgtgctttgatcgaaaaactcggtctgcgtaagtgataccggggacttaattaacggcactcctcagccaagtcaaaagcctccggtcggaggcttttgactacatgcccatggcgtttacgccccgccctgccactcatcgcagtactgttgtaattcattaagcattctgccgacatggaagccatcacaaacggcatgatgaacctgaatcgccagcggcatcagcaccttgtcgccttgcgtataatatttgcccatagtgaaaacgggggcgaagaagttgtccatattggccacgtttaaatcaaaactggtgaaactcacccagggattggctgagacgaaaaacatattctcaataaaccctttagggaaataggccaggttttcaccgtaacacgccacatcttgcgaatatatgtgtagaaactgccggaaatcgtcgtggtattcactccagagcgatgaaaacgtttcagtttgctcatggaaaacggtgtaacaagggtgaacactatcccatatcaccagctcaccgtctttcattgccatacggaactccggatgagcattcatcaggcgggcaagaatgtgaataaaggccggataaaacttgtgcttatttttctttacggtctttaaaaaggccgtaatatccagctgaacggtctggttataggtacattgagcaactgactgaaatgcctcaaaatgttctttacgatgccattgggatatatcaacggtggtatatccagtgatttttttctccattttagcttccttagctcctgaaaatctcgataactcaaaaaatacgcccggtagtgatcttatttcattatggtgaaagttggaacctcttacgtgccaagccaaataggccgt

SEQ ID NO: 187 - DNA, 4514 bp, Artificial
  Synthetic
tcagatccttccgtatttagccagtatgttctctagtgtggttcgttgtttttgcgtgagccatgagaacgaaccattgagatcatgcttactttgcatgtcactcaaaaattttgcctcaaaactggtgagctgaatttttgcagttaaagcatcgtgtagtgtttttcttagtccgttacgtaggtaggaatctgatgtaatggttgttggtattttgtcaccattcatttttatctggttgttctcaagttcggttacgagatccatttgtctatctagttcaacttggaaaatcaacgtatcagtcgggcggcctcgcttatcaaccaccaatttcatattgctgtaagtgtttaaatctttacttattggtttcaaaacccattggttaagccttttaaactcatggtagttattttcaagcattaacatgaacttaaattcatcaaggctaatctctatatttgccttgtgagttttcttttgtgttagttcttttaataaccactcataaatcctcatagagtatttgttttcaaaagacttaacatgttccagattatattttatgaatttttttaactggaaaagataaggcaatatctcttcactaaaaactaattctaatttttcgcttgagaacttggcatagtttgtccactggaaaatcttaaagcctttaaccaaaggattcctgatttccacagttctcgtcatcagctctctggttgctttagctaatacaccataagcattttccctactgatgttcatcatctgagcgtattggttataagtgaacgataccgtccgttctttccttgtagggttttcaatcgtggggttgagtagtgccacacagcataaaattagcttggtttcatgctccgttaagtcatagcgactaatcgctagttcatttgctttgaaaacaactaattcagacatacatctcaattggtctaggtgattttaatcactataccaattgagatgggctagtcaatgataattactagtccttttcctttgagttgtgggtatctgtaaattctgctagacctttgctggaaaacttgtaaattctgctagaccctctgtaaattccgctagacctttgtgtgttttttttgtttatattcaagtggttataatttatagaataaagaaagaataaaaaaagataaaaagaatagatcccagccctgtgtataactcactactttagtcagttccgcagtattacaaaaggatgtcgcaaacgctgtttgctcctctacaaaacagaccttaaaaccctaaaggcttaagtagcaccctcgcaagctcgggcaaatcgctgaatattccttttgtctccgaccatcaggcacctgagtcgctgtctttttcgtgacattcagttcgctgcgctcacggctctggcagtgaatgggggtaaatggcactacaggcgccttttatggattcatgcaaggaaactacccataatacaagaaaagcccgtcacgggcttctcagggcgttttatggcgggtctgctatgtggtgctatctgactttttgctgttcagcagttcctgccctctgattttccagtctgaccacttcggattatcccgtgacaggtcattcagactggctaatgcacccagtaaggcagcggtatcatcaacaggcttacccgtcttactgtcaagaggacatccggtcaaataaaacgaaaggctcagtcgaaagactgggcctttcgttttgctgaggagacttagggaccctttatgacaacttgacggctacatcattcactttttcttcacaaccggcacggaactcgctcgggctggccccggtgcattttttaaatacccgcgagaaatagagttgatcgtcaaaaccaacattgcgaccgacggtggcgataggcatccgggtggtgctcaaaagcagcttcgcctggctgatacgttggtcctcgcgccagcttaagacgctaatccctaactgctggcggaaaagatgtgacagacgcgacggcgacaagcaaacatgctgtgcgacgctggcgatatcaaaattgctgtctgccaggtgatcgctgatgtactgacaagcctcgcgtacccgattatccatcggtggatggagcgactcgttaatcgcttccatgcgccgcagtaacaattgctcaagcagatttatcgccagcagctccgaatagcgcccttccccttgcccggcgttaatgatttgcccaaacaggtcgctgaaatgcggctggtgcgcttcatccgggcgaaagaaccccgtattggcaaatattgacggccagttaagccattcatgccagtaggcgcgcggacgaaagtaaacccactggtgataccattcgcgagcctccggatgacgaccgtagtgatgaatctctcctggcgggaacagcaaaatatcacccggtcggcaaacaaattctcgtccctgatttttcaccaccccctgaccgcgaatggtgagattgagaatataacctttcattcccagcggtcggtcgataaaaaaatcgagataaccgttggcctcaatcggcgttaaacccgccaccagatgggcattaaacgagtatcccggcagcaggggatcattttgcgcttcagccatacttttcatactcccaccattcagagaagaaaccaattgtccatattgcatcagacattgccgtcactgcgtcttttactggctcttctcgctaacccaaccggtaaccccgcttattaaaagcattctgtaacaaagcgggaccaaagccatgacaaaaacgcgtaacaaaagtgtctataatcacggcagaaaagtccacattgattatttgcacggcgtcacactttgctatgccatagcatttttatccataagattagcggatcctacctgacgctttttatcgcaactctctactgtttctccatacccgttttacctgcaggtgcagtaaaatataagggactcggtgatggctaatcattcttcagcaaaaaaagctgttagacaaacagtaaaaagaactctaatcaataaaaaacgatctagtgcaataaagacttttataaagaaagttgtacatgaaatcagtcttggtaataaagaaaatgctaacatagctttatctgttgctcagtctaagataatgcaaggtgtgaaaaaaaatataattaaattaaataccgcctcaagaaaaatcagcagattatcaaggcaaataaaaagtttgaaagtaaataacactttatagtaatttaaataattgtaagtaatataatatggcagtaaaaattcgtttagctagaggcggtgctaaaaagcgtcctttttaccgtgtagtagtagctaacgcaacagcacctcgtgacggtgactttttagaaaaagtcggaacttatgatccaatgcttgcttcagataatagtgagcgtgttgttttaaaaaaagatcgtataaaatattggcttggcaccggtgctaaaccaactgagcgagtcgcaaaatttattgagcaagcgggtgttactcttcctgagaaagttaaaaaggaaatggaagtgaaagcaaaaaaccgcaaagctagactaagtaaaaaggaagctaaagaagcttagtttatagtacttaattaacggcactcctcagccaagtcaaaagcctccggtcggaggcttttgactacatgcccatggcgtttacgccccgccctgccactcatcgcagtactgttgtaattcattaagcattctgccgacatggaagccatcacaaacggcatgatgaacctgaatcgccagcggcatcagcaccttgtcgccttgcgtataatatttgcccatagtgaaaacgggggcgaagaagttgtccatattggccacgtttaaatcaaaactggtgaaactcacccagggattggctgagacgaaaaacatattctcaataaaccctttagggaaataggccaggttttcaccgtaacacgccacatcttgcgaatatatgtgtagaaactgccggaaatcgtcgtggtattcactccagagcgatgaaaacgtttcagtttgctcatggaaaacggtgtaacaagggtgaacactatcccatatcaccagctcaccgtctttcattgccatacggaactccggatgagcattcatcaggcgggcaagaatgtgaataaaggccggataaaacttgtgcttatttttctttacggtctttaaaaaggccgtaatatccagctgaacggtctggttataggtacattgagcaactgactgaaatgcctcaaaatgttctttacgatgccattgggatatatcaacggtggtatatccagtgatttttttctccattttagcttccttagctcctgaaaatctcgataactcaaaaaatacgcccggtagtgatcttatttcattatggtgaaagttggaacctcttacgtgccaagccaaataggccgt

SEQ ID NO: 188 - DNA, 6553 bp, Artificial
  Synthetic
tcagatccttccgtatttagccagtatgttctctagtgtggttcgttgtttttgcgtgagccatgagaacgaaccattgagatcatgcttactttgcatgtcactcaaaaattttgcctcaaaactggtgagctgaatttttgcagttaaagcatcgtgtagtgtttttcttagtccgttacgtaggtaggaatctgatgtaatggttgttggtattttgtcaccattcatttttatctggttgttctcaagttcggttacgagatccatttgtctatctagttcaacttggaaaatcaacgtatcagtcgggcggcctcgcttatcaaccaccaatttcatattgctgtaagtgtttaaatctttacttattggtttcaaaacccattggttaagccttttaaactcatggtagttattttcaagcattaacatgaacttaaattcatcaaggctaatctctatatttgccttgtgagttttcttttgtgttagttcttttaataaccactcataaatcctcatagagtatttgttttcaaaagacttaacatgttccagattatattttatgaatttttttaactggaaaagataaggcaatatctcttcactaaaaactaattctaatttttcgcttgagaacttggcatagtttgtccactggaaaatcttaaagcctttaaccaaaggattcctgatttccacagttctcgtcatcagctctctggttgctttagctaatacaccataagcattttccctactgatgttcatcatctgagcgtattggttataagtgaacgataccgtccgttctttccttgtagggttttcaatcgtggggttgagtagtgccacacagcataaaattagcttggtttcatgctccgttaagtcatagcgactaatcgctagttcatttgctttgaaaacaactaattcagacatacatctcaattggtctaggtgattttaatcactataccaattgagatgggctagtcaatgataattactagtccttttcctttgagttgtgggtatctgtaaattctgctagacctttgctggaaaacttgtaaattctgctagaccctctgtaaattccgctagacctttgtgtgttttttttgtttatattcaagtggttataatttatagaataaagaaagaataaaaaaagataaaaagaatagatcccagccctgtgtataactcactactttagtcagttccgcagtattacaaaaggatgtcgcaaacgctgtttgctcctctacaaaacagaccttaaaaccctaaaggcttaagtagcaccctcgcaagctcgggcaaatcgctgaatattccttttgtctccgaccatcaggcacctgagtcgctgtctttttcgtgacattcagttcgctgcgctcacggctctggcagtgaatgggggtaaatggcactacaggcgccttttatggattcatgcaaggaaactacccataatacaagaaaagcccgtcacgggcttctcagggcgttttatggcgggtctgctatgtggtgctatctgactttttgctgttcagcagttcctgccctctgattttccagtctgaccacttcggattatcccgtgacaggtcattcagactggctaatgcacccagtaaggcagcggtatcatcaacaggcttacccgtcttactgtcaagaggacatccggtcaaataaaacgaaaggctcagtcgaaagactgggcctttcgttttgctgaggagacttagggaccctttatgacaacttgacggctacatcattcactttttcttcacaaccggcacggaactcgctcgggctggccccggtgcattttttaaatacccgcgagaaatagagttgatcgtcaaaaccaacattgcgaccgacggtggcgataggcatccgggtggtgctcaaaagcagcttcgcctggctgatacgttggtcctcgcgccagcttaagacgctaatccctaactgctggcggaaaagatgtgacagacgcgacggcgacaagcaaacatgctgtgcgacgctggcgatatcaaaattgctgtctgccaggtgatcgctgatgtactgacaagcctcgcgtacccgattatccatcggtggatggagcgactcgttaatcgcttccatgcgccgcagtaacaattgctcaagcagatttatcgccagcagctccgaatagcgcccttccccttgcccggcgttaatgatttgcccaaacaggtcgctgaaatgcggctggtgcgcttcatccgggcgaaagaaccccgtattggcaaatattgacggccagttaagccattcatgccagtaggcgcgcggacgaaagtaaacccactggtgataccattcgcgagcctccggatgacgaccgtagtgatgaatctctcctggcgggaacagcaaaatatcacccggtcggcaaacaaattctcgtccctgatttttcaccaccccctgaccgcgaatggtgagattgagaatataacctttcattcccagcggtcggtcgataaaaaaatcgagataaccgttggcctcaatcggcgttaaacccgccaccagatgggcattaaacgagtatcccggcagcaggggatcattttgcgcttcagccatacttttcatactcccaccattcagagaagaaaccaattgtccatattgcatcagacattgccgtcactgcgtcttttactggctcttctcgctaacccaaccggtaaccccgcttattaaaagcattctgtaacaaagcgggaccaaagccatgacaaaaacgcgtaacaaaagtgtctataatcacggcagaaaagtccacattgattatttgcacggcgtcacactttgctatgccatagcatttttatccataagattagcggatcctacctgacgctttttatcgcaactctctactgtttctccatacccgttttacctgcaggtgcagtaaaatataagggactcggtgatggctaatcattcttcagcaaaaaaagctgttagacaaacagtaaaaagaactctaatcaataaaaaacgatctagtgcaataaagacttttataaagaaagttgtacatgaaatcagtcttggtaataaagaaaatgctaacatagctttatctgttgctcagtctaagataatgcaaggtgtgaaaaaaaatataattaaattaaataccgcctcaagaaaaatcagcagattatcaaggcaaataaaaagtttgaaagtaaataacactttatagtaatttaaataattgtaagtaatataatatggcagtaaaaattcgtttagctagaggcggtgctaaaaagcgtcctttttaccgtgtagtagtagctaacgcaacagcacctcgtgacggtgactttttagaaaaagtcggaacttatgatccaatgcttgcttcagataatagtgagcgtgttgttttaaaaaaagatcgtataaaatattggcttggcaccggtgctaaaccaactgagcgagtcgcaaaatttattgagcaagcgggtgttactcttcctgagaaagttaaaaaggaaatggaagtgaaagcaaaaaaccgcaaagctagactaagtaaaaaggaagctaaagaagcttagtttatagtgctaatactacgagaagaatatgtcaataaaactaaaacaacgatttgttccacaacttgcagcaatgaatcacgaatttgcggaagatttctctaaaatgcttgaaaccgttgatacaagtcatataaaagaaaaaacggtagttaaaggtcaagtaatcgaaataaaaaacgatataattattgttgacgttggattaaaaaatgaaggtagaatacctaagtctgaatttttagctttacctgaagttggggacgtagtcgaagttttcatcgagaaaattgaaggacgtaacggcagaacaatattgagccgtgaaaaagcagttaaagaagaattatggggacaactagaaatcatgtgttccaagggcgaatttgtcgacggtacgattttcggtcgtgtaaaaggaggctttaccgtggatttatccggtgtagtagcattcttaccgggaagccaagttgacgttagacctattaaagatcctacttctataatgaatatcaagcaaccgtttaaaattttaagtatggataaaaagcttggtaatatagtagtttcaagaagagctattttagaagaatcacgttccgaagctagagatgagatgctatctaaaattaaagaaggcatggtattagaaggaaccgtaaaaaatattactgattacggtgcgtttatcgatcttggaagtgttgacggtttattacatttaaccgatatttcttggggaagagttaaccatccttcagaagtgttagactttaaccaaaaggttaaagtaatggttattaagtttgatgaaaaaacaaaaagaatatcactcggtataaaacaacttgattctaacccatgggaagcaattaaagaagaattccccgtcggtaaacaaatgaccggtaaagttacaaattttgctgattacggcgtatttatagaattaaaagacgggcttgagggacttgttcattcaagcgaaattagttggttaaaatctaatcaaaatcctagaaaaacgctaactatagggcaagaagtagacttcgtagttttagaggtcgatactgaaaagcatcgtgtttctttaagtattaaacaatgccaagaaaatcctttaacaaagttcgctgaaaataatcctgtcggtactataattaaagcacctattagaaatattacggatttcggtatttttgttgcactcggtaataatatggacggcatgattcatgaaggtgatattagctgggaagataaaggaacggatctattaaaatcatacaaaaaaggtgacgaaatagaatgcaaagttctagccattaatattgaaaaagaacaagttagtttaggtataaaacaattgtcgccgaatccatatcaagaaatcagtgatgaatataaaaaaggcaccatagttaaagcccttataacagaagttaaagatgagggactcgaagtattattaaacgataaagtagcaggttttattaaaagaactgaactatcggatgaaaaagacgagcagaagcctgaaatgtttcaaatagacaaagaaatagaagccaaagttgtttctatcgagaaatcaaccggtagaattttattatcggtaaaagctcataaaatagcagaacgtcaaaaagctctcaaagaatatggttctagtgataatactaccaatatgggagatatacttgctaatgctttagaagataagaagtaataatctattatttaaggagaaattatcgatgtcgattactacagaacgtaaacaacaattaattaaagaatatgctataacggaaaatgataccggttcaagtgcagtgcaatgtgctatcttaactgaaagaatcaataatttaaccgagcattttaaatctaaccataaagatcatacttcaagacgcggattattaattttagttgggcgccgccgcagattacttaactatattaaaaagaataatgttagcaaatatttagatttaataagtaagctaggaattagaaagattaagtagttggataaacttaattaacggcactcctcagccaagtcaaaagcctccggtcggaggcttttgactacatgcccatggcgtttacgccccgccctgccactcatcgcagtactgttgtaattcattaagcattctgccgacatggaagccatcacaaacggcatgatgaacctgaatcgccagcggcatcagcaccttgtcgccttgcgtataatatttgcccatagtgaaaacgggggcgaagaagttgtccatattggccacgtttaaatcaaaactggtgaaactcacccagggattggctgagacgaaaaacatattctcaataaaccctttagggaaataggccaggttttcaccgtaacacgccacatcttgcgaatatatgtgtagaaactgccggaaatcgtcgtggtattcactccagagcgatgaaaacgtttcagtttgctcatggaaaacggtgtaacaagggtgaacactatcccatatcaccagctcaccgtctttcattgccatacggaactccggatgagcattcatcaggcgggcaagaatgtgaataaaggccggataaaacttgtgcttatttttctttacggtctttaaaaaggccgtaatatccagctgaacggtctggttataggtacattgagcaactgactgaaatgcctcaaaatgttctttacgatgccattgggatatatcaacggtggtatatccagtgatttttttctccattttagcttccttagctcctgaaaatctcgataactcaaaaaatacgcccggtagtgatcttatttcattatggtgaaagttggaacctcttacgtgccaagccaaataggccgt

SEQ ID NO: 189 - DNA, 4120 bp, Artificial
  Synthetic
tcagatccttccgtatttagccagtatgttctctagtgtggttcgttgtttttgcgtgagccatgagaacgaaccattgagatcatgcttactttgcatgtcactcaaaaattttgcctcaaaactggtgagctgaatttttgcagttaaagcatcgtgtagtgtttttcttagtccgttacgtaggtaggaatctgatgtaatggttgttggtattttgtcaccattcatttttatctggttgttctcaagttcggttacgagatccatttgtctatctagttcaacttggaaaatcaacgtatcagtcgggcggcctcgcttatcaaccaccaatttcatattgctgtaagtgtttaaatctttacttattggtttcaaaacccattggttaagccttttaaactcatggtagttattttcaagcattaacatgaacttaaattcatcaaggctaatctctatatttgccttgtgagttttcttttgtgttagttcttttaataaccactcataaatcctcatagagtatttgttttcaaaagacttaacatgttccagattatattttatgaatttttttaactggaaaagataaggcaatatctcttcactaaaaactaattctaatttttcgcttgagaacttggcatagtttgtccactggaaaatcttaaagcctttaaccaaaggattcctgatttccacagttctcgtcatcagctctctggttgctttagctaatacaccataagcattttccctactgatgttcatcatctgagcgtattggttataagtgaacgataccgtccgttctttccttgtagggttttcaatcgtggggttgagtagtgccacacagcataaaattagcttggtttcatgctccgttaagtcatagcgactaatcgctagttcatttgctttgaaaacaactaattcagacatacatctcaattggtctaggtgattttaatcactataccaattgagatgggctagtcaatgataattactagtccttttcctttgagttgtgggtatctgtaaattctgctagacctttgctggaaaacttgtaaattctgctagaccctctgtaaattccgctagacctttgtgtgttttttttgtttatattcaagtggttataatttatagaataaagaaagaataaaaaaagataaaaagaatagatcccagccctgtgtataactcactactttagtcagttccgcagtattacaaaaggatgtcgcaaacgctgtttgctcctctacaaaacagaccttaaaaccctaaaggcttaagtagcaccctcgcaagctcgggcaaatcgctgaatattccttttgtctccgaccatcaggcacctgagtcgctgtctttttcgtgacattcagttcgctgcgctcacggctctggcagtgaatgggggtaaatggcactacaggcgccttttatggattcatgcaaggaaactacccataatacaagaaaagcccgtcacgggcttctcagggcgttttatggcgggtctgctatgtggtgctatctgactttttgctgttcagcagttcctgccctctgattttccagtctgaccacttcggattatcccgtgacaggtcattcagactggctaatgcacccagtaaggcagcggtatcatcaacaggcttacccgtcttactgtcaagaggacatccggtcaaataaaacgaaaggctcagtcgaaagactgggcctttcgttttgctgaggagacttagggaccctttatgacaacttgacggctacatcattcactttttcttcacaaccggcacggaactcgctcgggctggccccggtgcattttttaaatacccgcgagaaatagagttgatcgtcaaaaccaacattgcgaccgacggtggcgataggcatccgggtggtgctcaaaagcagcttcgcctggctgatacgttggtcctcgcgccagcttaagacgctaatccctaactgctggcggaaaagatgtgacagacgcgacggcgacaagcaaacatgctgtgcgacgctggcgatatcaaaattgctgtctgccaggtgatcgctgatgtactgacaagcctcgcgtacccgattatccatcggtggatggagcgactcgttaatcgcttccatgcgccgcagtaacaattgctcaagcagatttatcgccagcagctccgaatagcgcccttccccttgcccggcgttaatgatttgcccaaacaggtcgctgaaatgcggctggtgcgcttcatccgggcgaaagaaccccgtattggcaaatattgacggccagttaagccattcatgccagtaggcgcgcggacgaaagtaaacccactggtgataccattcgcgagcctccggatgacgaccgtagtgatgaatctctcctggcgggaacagcaaaatatcacccggtcggcaaacaaattctcgtccctgatttttcaccaccccctgaccgcgaatggtgagattgagaatataacctttcattcccagcggtcggtcgataaaaaaatcgagataaccgttggcctcaatcggcgttaaacccgccaccagatgggcattaaacgagtatcccggcagcaggggatcattttgcgcttcagccatacttttcatactcccaccattcagagaagaaaccaattgtccatattgcatcagacattgccgtcactgcgtcttttactggctcttctcgctaacccaaccggtaaccccgcttattaaaagcattctgtaacaaagcgggaccaaagccatgacaaaaacgcgtaacaaaagtgtctataatcacggcagaaaagtccacattgattatttgcacggcgtcacactttgctatgccatagcatttttatccataagattagcggatcctacctgacgctttttatcgcaactctctactgtttctccatacccgttttacctgcaggtgcagtttttaaaggaaagactcgtaatggtaaccattcgtttagcacgtggtggcgcaaaaaagcgtccgttttatcacctacacgtaactgattcacgtaatgcacgtgatggtcgttacattgagcgcctaggtttctttaaccctgtagctcaaggtaatgcagagcgtctacgtattgatactgatcgtctacagcactgggttgctcaaggcgcacagttgtcagagcgtgttgctaagttagtaaaagaagcagctaagcagcagtaattactgctacttaattaacggcactcctcagccaagtcaaaagcctccggtcggaggcttttgactacatgcccatggcgtttacgccccgccctgccactcatcgcagtactgttgtaattcattaagcattctgccgacatggaagccatcacaaacggcatgatgaacctgaatcgccagcggcatcagcaccttgtcgccttgcgtataatatttgcccatagtgaaaacgggggcgaagaagttgtccatattggccacgtttaaatcaaaactggtgaaactcacccagggattggctgagacgaaaaacatattctcaataaaccctttagggaaataggccaggttttcaccgtaacacgccacatcttgcgaatatatgtgtagaaactgccggaaatcgtcgtggtattcactccagagcgatgaaaacgtttcagtttgctcatggaaaacggtgtaacaagggtgaacactatcccatatcaccagctcaccgtctttcattgccatacggaactccggatgagcattcatcaggcgggcaagaatgtgaataaaggccggataaaacttgtgcttatttttctttacggtctttaaaaaggccgtaatatccagctgaacggtctggttataggtacattgagcaactgactgaaatgcctcaaaatgttctttacgatgccattgggatatatcaacggtggtatatccagtgatttttttctccattttagcttccttagctcctgaaaatctcgataactcaaaaaatacgcccggtagtgatcttatttcattatggtgaaagttggaacctcttacgtgccaagccaaataggccgt

SEQ ID NO: 190 - DNA, 4418 bp, Artificial
  Synthetic
tcagatccttccgtatttagccagtatgttctctagtgtggttcgttgtttttgcgtgagccatgagaacgaaccattgagatcatgcttactttgcatgtcactcaaaaattttgcctcaaaactggtgagctgaatttttgcagttaaagcatcgtgtagtgtttttcttagtccgttacgtaggtaggaatctgatgtaatggttgttggtattttgtcaccattcatttttatctggttgttctcaagttcggttacgagatccatttgtctatctagttcaacttggaaaatcaacgtatcagtcgggcggcctcgcttatcaaccaccaatttcatattgctgtaagtgtttaaatctttacttattggtttcaaaacccattggttaagccttttaaactcatggtagttattttcaagcattaacatgaacttaaattcatcaaggctaatctctatatttgccttgtgagttttcttttgtgttagttcttttaataaccactcataaatcctcatagagtatttgttttcaaaagacttaacatgttccagattatattttatgaatttttttaactggaaaagataaggcaatatctcttcactaaaaactaattctaatttttcgcttgagaacttggcatagtttgtccactggaaaatcttaaagcctttaaccaaaggattcctgatttccacagttctcgtcatcagctctctggttgctttagctaatacaccataagcattttccctactgatgttcatcatctgagcgtattggttataagtgaacgataccgtccgttctttccttgtagggttttcaatcgtggggttgagtagtgccacacagcataaaattagcttggtttcatgctccgttaagtcatagcgactaatcgctagttcatttgctttgaaaacaactaattcagacatacatctcaattggtctaggtgattttaatcactataccaattgagatgggctagtcaatgataattactagtccttttcctttgagttgtgggtatctgtaaattctgctagacctttgctggaaaacttgtaaattctgctagaccctctgtaaattccgctagacctttgtgtgttttttttgtttatattcaagtggttataatttatagaataaagaaagaataaaaaaagataaaaagaatagatcccagccctgtgtataactcactactttagtcagttccgcagtattacaaaaggatgtcgcaaacgctgtttgctcctctacaaaacagaccttaaaaccctaaaggcttaagtagcaccctcgcaagctcgggcaaatcgctgaatattccttttgtctccgaccatcaggcacctgagtcgctgtctttttcgtgacattcagttcgctgcgctcacggctctggcagtgaatgggggtaaatggcactacaggcgccttttatggattcatgcaaggaaactacccataatacaagaaaagcccgtcacgggcttctcagggcgttttatggcgggtctgctatgtggtgctatctgactttttgctgttcagcagttcctgccctctgattttccagtctgaccacttcggattatcccgtgacaggtcattcagactggctaatgcacccagtaaggcagcggtatcatcaacaggcttacccgtcttactgtcaagaggacatccggtcaaataaaacgaaaggctcagtcgaaagactgggcctttcgttttgctgaggagacttagggaccctttatgacaacttgacggctacatcattcactttttcttcacaaccggcacggaactcgctcgggctggccccggtgcattttttaaatacccgcgagaaatagagttgatcgtcaaaaccaacattgcgaccgacggtggcgataggcatccgggtggtgctcaaaagcagcttcgcctggctgatacgttggtcctcgcgccagcttaagacgctaatccctaactgctggcggaaaagatgtgacagacgcgacggcgacaagcaaacatgctgtgcgacgctggcgatatcaaaattgctgtctgccaggtgatcgctgatgtactgacaagcctcgcgtacccgattatccatcggtggatggagcgactcgttaatcgcttccatgcgccgcagtaacaattgctcaagcagatttatcgccagcagctccgaatagcgcccttccccttgcccggcgttaatgatttgcccaaacaggtcgctgaaatgcggctggtgcgcttcatccgggcgaaagaaccccgtattggcaaatattgacggccagttaagccattcatgccagtaggcgcgcggacgaaagtaaacccactggtgataccattcgcgagcctccggatgacgaccgtagtgatgaatctctcctggcgggaacagcaaaatatcacccggtcggcaaacaaattctcgtccctgatttttcaccaccccctgaccgcgaatggtgagattgagaatataacctttcattcccagcggtcggtcgataaaaaaatcgagataaccgttggcctcaatcggcgttaaacccgccaccagatgggcattaaacgagtatcccggcagcaggggatcattttgcgcttcagccatacttttcatactcccaccattcagagaagaaaccaattgtccatattgcatcagacattgccgtcactgcgtcttttactggctcttctcgctaacccaaccggtaaccccgcttattaaaagcattctgtaacaaagcgggaccaaagccatgacaaaaacgcgtaacaaaagtgtctataatcacggcagaaaagtccacattgattatttgcacggcgtcacactttgctatgccatagcatttttatccataagattagcggatcctacctgacgctttttatcgcaactctctactgtttctccatacccgttttacctgcaggtgcagtcaaaactccaaggagttatcgtggccaacatcaagtctgcccagaagcgtgcgcttcaatccgaaaaacgtcgtctgcacaacaacagcctacgttctaaagtacgtaccagcatcaagcgtgtacttaaagaagtacaaactggtgactgggaaaaagctatggctgctttccaagctgcacagccagttattgatcgcattgctgacaagggtgttttcaacaagaactgggctgctcgtactaagagccgtctgaacgctcgtgttaaagcacttaaagcttcctaagttttaggttttaaaggaaagactcgtaatggtaaccattcgtttagcacgtggtggcgcaaaaaagcgtccgttttatcacctacacgtaactgattcacgtaatgcacgtgatggtcgttacattgagcgcctaggtttctttaaccctgtagctcaaggtaatgcagagcgtctacgtattgatactgatcgtctacagcactgggttgctcaaggcgcacagttgtcagagcgtgttgctaagttagtaaaagaagcagctaagcagcagtaattactgctacttaattaacggcactcctcagccaagtcaaaagcctccggtcggaggcttttgactacatgcccatggcgtttacgccccgccctgccactcatcgcagtactgttgtaattcattaagcattctgccgacatggaagccatcacaaacggcatgatgaacctgaatcgccagcggcatcagcaccttgtcgccttgcgtataatatttgcccatagtgaaaacgggggcgaagaagttgtccatattggccacgtttaaatcaaaactggtgaaactcacccagggattggctgagacgaaaaacatattctcaataaaccctttagggaaataggccaggttttcaccgtaacacgccacatcttgcgaatatatgtgtagaaactgccggaaatcgtcgtggtattcactccagagcgatgaaaacgtttcagtttgctcatggaaaacggtgtaacaagggtgaacactatcccatatcaccagctcaccgtctttcattgccatacggaactccggatgagcattcatcaggcgggcaagaatgtgaataaaggccggataaaacttgtgcttatttttctttacggtctttaaaaaggccgtaatatccagctgaacggtctggttataggtacattgagcaactgactgaaatgcctcaaaatgttctttacgatgccattgggatatatcaacggtggtatatccagtgatttttttctccattttagcttccttagctcctgaaaatctcgataactcaaaaaatacgcccggtagtgatcttatttcattatggtgaaagttggaacctcttacgtgccaagccaaataggccgt

SEQ ID NO: 191 - DNA, 6409 bp, Artificial
  Synthetic
tcagatccttccgtatttagccagtatgttctctagtgtggttcgttgtttttgcgtgagccatgagaacgaaccattgagatcatgcttactttgcatgtcactcaaaaattttgcctcaaaactggtgagctgaatttttgcagttaaagcatcgtgtagtgtttttcttagtccgttacgtaggtaggaatctgatgtaatggttgttggtattttgtcaccattcatttttatctggttgttctcaagttcggttacgagatccatttgtctatctagttcaacttggaaaatcaacgtatcagtcgggcggcctcgcttatcaaccaccaatttcatattgctgtaagtgtttaaatctttacttattggtttcaaaacccattggttaagccttttaaactcatggtagttattttcaagcattaacatgaacttaaattcatcaaggctaatctctatatttgccttgtgagttttcttttgtgttagttcttttaataaccactcataaatcctcatagagtatttgttttcaaaagacttaacatgttccagattatattttatgaatttttttaactggaaaagataaggcaatatctcttcactaaaaactaattctaatttttcgcttgagaacttggcatagtttgtccactggaaaatcttaaagcctttaaccaaaggattcctgatttccacagttctcgtcatcagctctctggttgctttagctaatacaccataagcattttccctactgatgttcatcatctgagcgtattggttataagtgaacgataccgtccgttctttccttgtagggttttcaatcgtggggttgagtagtgccacacagcataaaattagcttggtttcatgctccgttaagtcatagcgactaatcgctagttcatttgctttgaaaacaactaattcagacatacatctcaattggtctaggtgattttaatcactataccaattgagatgggctagtcaatgataattactagtccttttcctttgagttgtgggtatctgtaaattctgctagacctttgctggaaaacttgtaaattctgctagaccctctgtaaattccgctagacctttgtgtgttttttttgtttatattcaagtggttataatttatagaataaagaaagaataaaaaaagataaaaagaatagatcccagccctgtgtataactcactactttagtcagttccgcagtattacaaaaggatgtcgcaaacgctgtttgctcctctacaaaacagaccttaaaaccctaaaggcttaagtagcaccctcgcaagctcgggcaaatcgctgaatattccttttgtctccgaccatcaggcacctgagtcgctgtctttttcgtgacattcagttcgctgcgctcacggctctggcagtgaatgggggtaaatggcactacaggcgccttttatggattcatgcaaggaaactacccataatacaagaaaagcccgtcacgggcttctcagggcgttttatggcgggtctgctatgtggtgctatctgactttttgctgttcagcagttcctgccctctgattttccagtctgaccacttcggattatcccgtgacaggtcattcagactggctaatgcacccagtaaggcagcggtatcatcaacaggcttacccgtcttactgtcaagaggacatccggtcaaataaaacgaaaggctcagtcgaaagactgggcctttcgttttgctgaggagacttagggaccctttatgacaacttgacggctacatcattcactttttcttcacaaccggcacggaactcgctcgggctggccccggtgcattttttaaatacccgcgagaaatagagttgatcgtcaaaaccaacattgcgaccgacggtggcgataggcatccgggtggtgctcaaaagcagcttcgcctggctgatacgttggtcctcgcgccagcttaagacgctaatccctaactgctggcggaaaagatgtgacagacgcgacggcgacaagcaaacatgctgtgcgacgctggcgatatcaaaattgctgtctgccaggtgatcgctgatgtactgacaagcctcgcgtacccgattatccatcggtggatggagcgactcgttaatcgcttccatgcgccgcagtaacaattgctcaagcagatttatcgccagcagctccgaatagcgcccttccccttgcccggcgttaatgatttgcccaaacaggtcgctgaaatgcggctggtgcgcttcatccgggcgaaagaaccccgtattggcaaatattgacggccagttaagccattcatgccagtaggcgcgcggacgaaagtaaacccactggtgataccattcgcgagcctccggatgacgaccgtagtgatgaatctctcctggcgggaacagcaaaatatcacccggtcggcaaacaaattctcgtccctgatttttcaccaccccctgaccgcgaatggtgagattgagaatataacctttcattcccagcggtcggtcgataaaaaaatcgagataaccgttggcctcaatcggcgttaaacccgccaccagatgggcattaaacgagtatcccggcagcaggggatcattttgcgcttcagccatacttttcatactcccaccattcagagaagaaaccaattgtccatattgcatcagacattgccgtcactgcgtcttttactggctcttctcgctaacccaaccggtaaccccgcttattaaaagcattctgtaacaaagcgggaccaaagccatgacaaaaacgcgtaacaaaagtgtctataatcacggcagaaaagtccacattgattatttgcacggcgtcacactttgctatgccatagcatttttatccataagattagcggatcctacctgacgctttttatcgcaactctctactgtttctccatacccgttttacctgcaggtgcagtcaaaactccaaggagttatcgtggccaacatcaagtctgcccagaagcgtgcgcttcaatccgaaaaacgtcgtctgcacaacaacagcctacgttctaaagtacgtaccagcatcaagcgtgtacttaaagaagtacaaactggtgactgggaaaaagctatggctgctttccaagctgcacagccagttattgatcgcattgctgacaagggtgttttcaacaagaactgggctgctcgtactaagagccgtctgaacgctcgtgttaaagcacttaaagcttcctaagttttaggttttaaaggaaagactcgtaatggtaaccattcgtttagcacgtggtggcgcaaaaaagcgtccgttttatcacctacacgtaactgattcacgtaatgcacgtgatggtcgttacattgagcgcctaggtttctttaaccctgtagctcaaggtaatgcagagcgtctacgtattgatactgatcgtctacagcactgggttgctcaaggcgcacagttgtcagagcgtgttgctaagttagtaaaagaagcagctaagcagcagtaattactgcttaaaatcgagtaaataatacatgacacaatcctttgccgaactctttgaagaaagcttgcaaacagtcaatatggaagtgggctctatcattaaagccactattgttgatgttgatggtgactgggttaccgttaacgctggcttaaagtcggaaggtgttatccaccgcaatcagtttgaaagcggtgaagatctaaccgttggttcacaagtgctagtagcactagaaaccgtagaagatggtttcggtgaaacccgtctatcccgtgaaaaagcacgtcgtgctgagtcttggattgagctagaagaagctttcgagaagagcgaaatcgtcaagggtattatcaatggcaaggtcaagggtggctttacagttgatatcaataccatccgtgccttcctaccaggttcacttgttgatgtacgcccagtgcgtgacacagcacacctagaatacaaagaactcgatttcaaagttatcaagctagatgctaagcgtaacaacgtggttgtttctcgccgtgccgtactagaagcagaaaactcagcagagcgtgaagaactgcttgctaacctagctgaaggccaagaagttaaaggtatcgttaagaaccttactgattacggtgccttcgttgacttgggcggcgtagacggtctactacacatcactgatatggcttggaagcgtattaagcatccttctgaaattgttgctgtgggtgatgaaatcaacgttaaggttcttaagtttgatcgcgagcgtaaccgtgtatcattaggtcttaagcagttgggtgaagatccatggattcaaattaaagcacgttaccctgagtcttcaatcattaaggcacgtatcactaacctaaccgattacggttgcttcgctgagctagaagaaggcgttgaaggtttagtacacgtttctgaaatggactggactaacaaaaacgttaatcctaagcaggttgttaacctaggtgacgaagtagaagtaatgattctagacatcgacgaagaacgtcgtcgtatttctctaggtatcaagcagtgccgcgctaatccttgggaagagttctcaagcaagtacaacaaaggcgacaaagtttctggcgctatcaagtcaatcactgacttcggtatctttgttggcttaaatggcggtatcgatggtctagttcacctgtctgatatttcttggaatgatactggggaagaagccgtacgtaagttcaagaaaggcgaagaagttgaaacaatcattctttcgattgacccagagcgtgagcgtatctcgctaggtgttaagcaacttgaaagcgatcctttcaatgagttcttagcactaaacgacaaaggctctatcgttaaaggtaaggtttctgcagttgaagctaaagaagccgttgttgacctaacagatgaagtgcaagcgattctaaaagcatctgaaattagtgctgagcgtgttgaagatgcgcgtaatgctctaaaagaaggcgatgaagttgaagcacgtattatcaacgttgatcgtaagaatcgtgtgattagcttgtctattaaagccaaagataaagttgaagctgaacaagcggttgctactcagcgtgaagctcaggctgaacttgcaggtccaaccactattggtgacctaatcaagcaaaaaatggaaaataactaatactaatcagcgactgtggagttttaaaatgttaactactgaacgtaaagctgaaatcgtaaaagaattcgcgcgtgctgaaaatgataccggctcacctgaagtacaggttgccttgctaacttttgatatcaatgcactacaatctcacttcgaaactaacaaaaaagatcaccacagccgtcgtggtctaattcgtaaggttagtcagcgtcgtaagctgctagactacttgaagaaaaaagacgtaacgcgttatgcagatctaattaagcgtttaggtctacgtcgctaagttatagaacttaattaacggcactcctcagccaagtcaaaagcctccggtcggaggcttttgactacatgcccatggcgtttacgccccgccctgccactcatcgcagtactgttgtaattcattaagcattctgccgacatggaagccatcacaaacggcatgatgaacctgaatcgccagcggcatcagcaccttgtcgccttgcgtataatatttgcccatagtgaaaacgggggcgaagaagttgtccatattggccacgtttaaatcaaaactggtgaaactcacccagggattggctgagacgaaaaacatattctcaataaaccctttagggaaataggccaggttttcaccgtaacacgccacatcttgcgaatatatgtgtagaaactgccggaaatcgtcgtggtattcactccagagcgatgaaaacgtttcagtttgctcatggaaaacggtgtaacaagggtgaacactatcccatatcaccagctcaccgtctttcattgccatacggaactccggatgagcattcatcaggcgggcaagaatgtgaataaaggccggataaaacttgtgcttatttttctttacggtctttaaaaaggccgtaatatccagctgaacggtctggttataggtacattgagcaactgactgaaatgcctcaaaatgttctttacgatgccattgggatatatcaacggtggtatatccagtgatttttttctccattttagcttccttagctcctgaaaatctcgataactcaaaaaatacgcccggtagtgatcttatttcattatggtgaaagttggaacctcttacgtgccaagccaaataggccgt

SEQ ID NO: 192 - DNA, 5909 bp, Artificial
  Synthetic
tcagatccttccgtatttagccagtatgttctctagtgtggttcgttgtttttgcgtgagccatgagaacgaaccattgagatcatgcttactttgcatgtcactcaaaaattttgcctcaaaactggtgagctgaatttttgcagttaaagcatcgtgtagtgtttttcttagtccgttacgtaggtaggaatctgatgtaatggttgttggtattttgtcaccattcatttttatctggttgttctcaagttcggttacgagatccatttgtctatctagttcaacttggaaaatcaacgtatcagtcgggcggcctcgcttatcaaccaccaatttcatattgctgtaagtgtttaaatctttacttattggtttcaaaacccattggttaagccttttaaactcatggtagttattttcaagcattaacatgaacttaaattcatcaaggctaatctctatatttgccttgtgagttttcttttgtgttagttcttttaataaccactcataaatcctcatagagtatttgttttcaaaagacttaacatgttccagattatattttatgaatttttttaactggaaaagataaggcaatatctcttcactaaaaactaattctaatttttcgcttgagaacttggcatagtttgtccactggaaaatcttaaagcctttaaccaaaggattcctgatttccacagttctcgtcatcagctctctggttgctttagctaatacaccataagcattttccctactgatgttcatcatctgagcgtattggttataagtgaacgataccgtccgttctttccttgtagggttttcaatcgtggggttgagtagtgccacacagcataaaattagcttggtttcatgctccgttaagtcatagcgactaatcgctagttcatttgctttgaaaacaactaattcagacatacatctcaattggtctaggtgattttaatcactataccaattgagatgggctagtcaatgataattactagtccttttcctttgagttgtgggtatctgtaaattctgctagacctttgctggaaaacttgtaaattctgctagaccctctgtaaattccgctagacctttgtgtgttttttttgtttatattcaagtggttataatttatagaataaagaaagaataaaaaaagataaaaagaatagatcccagccctgtgtataactcactactttagtcagttccgcagtattacaaaaggatgtcgcaaacgctgtttgctcctctacaaaacagaccttaaaaccctaaaggcttaagtagcaccctcgcaagctcgggcaaatcgctgaatattccttttgtctccgaccatcaggcacctgagtcgctgtctttttcgtgacattcagttcgctgcgctcacggctctggcagtgaatgggggtaaatggcactacaggcgccttttatggattcatgcaaggaaactacccataatacaagaaaagcccgtcacgggcttctcagggcgttttatggcgggtctgctatgtggtgctatctgactttttgctgttcagcagttcctgccctctgattttccagtctgaccacttcggattatcccgtgacaggtcattcagactggctaatgcacccagtaaggcagcggtatcatcaacaggcttacccgtcttactgtcaagaggacatccggtcaaataaaacgaaaggctcagtcgaaagactgggcctttcgttttgctgaggagacttagggaccctttatgacaacttgacggctacatcattcactttttcttcacaaccggcacggaactcgctcgggctggccccggtgcattttttaaatacccgcgagaaatagagttgatcgtcaaaaccaacattgcgaccgacggtggcgataggcatccgggtggtgctcaaaagcagcttcgcctggctgatacgttggtcctcgcgccagcttaagacgctaatccctaactgctggcggaaaagatgtgacagacgcgacggcgacaagcaaacatgctgtgcgacgctggcgatatcaaaattgctgtctgccaggtgatcgctgatgtactgacaagcctcgcgtacccgattatccatcggtggatggagcgactcgttaatcgcttccatgcgccgcagtaacaattgctcaagcagatttatcgccagcagctccgaatagcgcccttccccttgcccggcgttaatgatttgcccaaacaggtcgctgaaatgcggctggtgcgcttcatccgggcgaaagaaccccgtattggcaaatattgacggccagttaagccattcatgccagtaggcgcgcggacgaaagtaaacccactggtgataccattcgcgagcctccggatgacgaccgtagtgatgaatctctcctggcgggaacagcaaaatatcacccggtcggcaaacaaattctcgtccctgatttttcaccaccccctgaccgcgaatggtgagattgagaatataacctttcattcccagcggtcggtcgataaaaaaatcgagataaccgttggcctcaatcggcgttaaacccgccaccagatgggcattaaacgagtatcccggcagcaggggatcattttgcgcttcagccatacttttcatactcccaccattcagagaagaaaccaattgtccatattgcatcagacattgccgtcactgcgtcttttactggctcttctcgctaacccaaccggtaaccccgcttattaaaagcattctgtaacaaagcgggaccaaagccatgacaaaaacgcgtaacaaaagtgtctataatcacggcagaaaagtccacattgattatttgcacggcgtcacactttgctatgccatagcatttttatccataagattagcggatcctacctgacgctttttatcgcaactctctactgtttctccatacccgttttacctgcaggtgcagtgctgctattaactcaaattatcaggcagcctcttcttcagacggtgtctcttcaacagacacagacatggcctcaaccagatccgcgccgtcttcggcattttccatgtgccaggcttctgcaccctccatcagcgcatcggcaatcttgctgcagaacagacgaacagcacgaattgcatcgtcattgcccggaatgatgtagtcaataccggtcgggttgcagttggaatcgactactgccacgacagggatacccagcttctgagcttccttgatagccagctcttccttgcgcacatccacgacgaacaggcagtcaggcagattcaccatctccttgataccacccagtgagcgctccagcttctccagctcacgctgcatctgcagtgcctctttcttggtcagcaactcaaacacgccctcttctttctgacgctgcagatctttcatcttgcgtacggactgctgcactgtagcgaagttggtcagcgtaccacccaaccagcggtgattgatatagaactggccggcacggcaagcttcttccttgattgcatcacgcgcctggcgcttggtgccgacaaacagcacgcggccgccggcagtggccagctcctgcataaatgtgtaggcctcattggccatacgcagggttttctgcagatcgataatgtgaatgccgttacgtttgccgaagatgtacggagccatctttggattccagcggcgggtctgatgaccgaaatgaacacctgcttccagcagctgcttcatggtaaattggcatatctctattcctctcttacttcggacgcttggcgccatacttcgagcgagcctgtttacgactctcaacacccgttgtatccagaacaccacgcagaatatggtaacgcacacccggcaaatccttcacacggccgccacgaatcagcacaaccgagtgctcctgcagcttatgaccctcgcccggaatataggcggtgacttcctgaccattggtcagacgcacacgcgccactttacgcagagctgagtttggcttcttcggtgtcgtcgtatacacacgtgtgcaaacgccgcgacgctgcgggcaagcctgcaaggccggaaccttgttgattttgcgcttgtctttgcgcgacttgcgaatcaactgattgactgttggcatgattacctctcataaacaggcgcagccattgggctgcaaggagatagacaacgtggcaaatcatgtatccgcactgaaacgtgcccgccaggatcaaaagaaacgtattcagaatcgtgcccagaagtcggctatgcgtactgccgtcaagcaggtgctggtggctgtagaggcaggagacaagcaggctgcatccgatgcgctgaagcaggcgacgtccttgcttgaccgtgccggccgcaagaaccagatgcatccgcgtcaggcttcccgccgtgtttcccgcctgaatgcccatgttaaggctattggctaatatacctaatttttcggaggtaacaaatatggcaactgtgattcgcctgagccgtggtggacgcaagaagcgtcctttttattctgtagtcgtcatggacggccgcaagcgtcgtgatggcgcatttatcgagaagctcggttattttgatccgtgcaaagatcctgaagtgatccagctggaccttgagcgtgtgaaagcatggaccgatcagggtgcccaggtatccgatcgcgtggctagcctgatcgccaaggcatccgcgtaatcagcttgtgaatcatgccaatctctccttacagctgttcagcacgggtcagcacgttcaccaacatccagcgcttgcggcgggagattggggctgactcaatgatgcgtacggtatcaccgatgttgcatgtgttctctgcatcatgtgccatatatttcttgtgcgaacgtacggtcttgcgataacgcggatgcacaaacttgcgctccacctgcacgacgatggtctgctcgcccttgttgcttaatactaccccttcaagggtgcgcttgttgcttgttgcctcggacatctctctctacttaattaacggcactcctcagccaagtcaaaagcctccggtcggaggcttttgactacatgcccatggcgtttacgccccgccctgccactcatcgcagtactgttgtaattcattaagcattctgccgacatggaagccatcacaaacggcatgatgaacctgaatcgccagcggcatcagcaccttgtcgccttgcgtataatatttgcccatagtgaaaacgggggcgaagaagttgtccatattggccacgtttaaatcaaaactggtgaaactcacccagggattggctgagacgaaaaacatattctcaataaaccctttagggaaataggccaggttttcaccgtaacacgccacatcttgcgaatatatgtgtagaaactgccggaaatcgtcgtggtattcactccagagcgatgaaaacgtttcagtttgctcatggaaaacggtgtaacaagggtgaacactatcccatatcaccagctcaccgtctttcattgccatacggaactccggatgagcattcatcaggcgggcaagaatgtgaataaaggccggataaaacttgtgcttatttttctttacggtctttaaaaaggccgtaatatccagctgaacggtctggttataggtacattgagcaactgactgaaatgcctcaaaatgttctttacgatgccattgggatatatcaacggtggtatatccagtgatttttttctccattttagcttccttagctcctgaaaatctcgataactcaaaaaatacgcccggtagtgatcttatttcattatggtgaaagttggaacctcttacgtgccaggccaaataggccgt

SEQ ID NO: 193 - DNA, 4427 bp, Artificial
  Synthetic
tcagatccttccgtatttagccagtatgttctctagtgtggttcgttgtttttgcgtgagccatgagaacgaaccattgagatcatgcttactttgcatgtcactcaaaaattttgcctcaaaactggtgagctgaatttttgcagttaaagcatcgtgtagtgtttttcttagtccgttacgtaggtaggaatctgatgtaatggttgttggtattttgtcaccattcatttttatctggttgttctcaagttcggttacgagatccatttgtctatctagttcaacttggaaaatcaacgtatcagtcgggcggcctcgcttatcaaccaccaatttcatattgctgtaagtgtttaaatctttacttattggtttcaaaacccattggttaagccttttaaactcatggtagttattttcaagcattaacatgaacttaaattcatcaaggctaatctctatatttgccttgtgagttttcttttgtgttagttcttttaataaccactcataaatcctcatagagtatttgttttcaaaagacttaacatgttccagattatattttatgaatttttttaactggaaaagataaggcaatatctcttcactaaaaactaattctaatttttcgcttgagaacttggcatagtttgtccactggaaaatcttaaagcctttaaccaaaggattcctgatttccacagttctcgtcatcagctctctggttgctttagctaatacaccataagcattttccctactgatgttcatcatctgagcgtattggttataagtgaacgataccgtccgttctttccttgtagggttttcaatcgtggggttgagtagtgccacacagcataaaattagcttggtttcatgctccgttaagtcatagcgactaatcgctagttcatttgctttgaaaacaactaattcagacatacatctcaattggtctaggtgattttaatcactataccaattgagatgggctagtcaatgataattactagtccttttcctttgagttgtgggtatctgtaaattctgctagacctttgctggaaaacttgtaaattctgctagaccctctgtaaattccgctagacctttgtgtgttttttttgtttatattcaagtggttataatttatagaataaagaaagaataaaaaaagataaaaagaatagatcccagccctgtgtataactcactactttagtcagttccgcagtattacaaaaggatgtcgcaaacgctgtttgctcctctacaaaacagaccttaaaaccctaaaggcttaagtagcaccctcgcaagctcgggcaaatcgctgaatattccttttgtctccgaccatcaggcacctgagtcgctgtctttttcgtgacattcagttcgctgcgctcacggctctggcagtgaatgggggtaaatggcactacaggcgccttttatggattcatgcaaggaaactacccataatacaagaaaagcccgtcacgggcttctcagggcgttttatggcgggtctgctatgtggtgctatctgactttttgctgttcagcagttcctgccctctgattttccagtctgaccacttcggattatcccgtgacaggtcattcagactggctaatgcacccagtaaggcagcggtatcatcaacaggcttacccgtcttactgtcaagaggacatccggtcaaataaaacgaaaggctcagtcgaaagactgggcctttcgttttgctgaggagacttagggaccctttatgacaacttgacggctacatcattcactttttcttcacaaccggcacggaactcgctcgggctggccccggtgcattttttaaatacccgcgagaaatagagttgatcgtcaaaaccaacattgcgaccgacggtggcgataggcatccgggtggtgctcaaaagcagcttcgcctggctgatacgttggtcctcgcgccagcttaagacgctaatccctaactgctggcggaaaagatgtgacagacgcgacggcgacaagcaaacatgctgtgcgacgctggcgatatcaaaattgctgtctgccaggtgatcgctgatgtactgacaagcctcgcgtacccgattatccatcggtggatggagcgactcgttaatcgcttccatgcgccgcagtaacaattgctcaagcagatttatcgccagcagctccgaatagcgcccttccccttgcccggcgttaatgatttgcccaaacaggtcgctgaaatgcggctggtgcgcttcatccgggcgaaagaaccccgtattggcaaatattgacggccagttaagccattcatgccagtaggcgcgcggacgaaagtaaacccactggtgataccattcgcgagcctccggatgacgaccgtagtgatgaatctctcctggcgggaacagcaaaatatcacccggtcggcaaacaaattctcgtccctgatttttcaccaccccctgaccgcgaatggtgagattgagaatataacctttcattcccagcggtcggtcgataaaaaaatcgagataaccgttggcctcaatcggcgttaaacccgccaccagatgggcattaaacgagtatcccggcagcaggggatcattttgcgcttcagccatacttttcatactcccaccattcagagaagaaaccaattgtccatattgcatcagacattgccgtcactgcgtcttttactggctcttctcgctaacccaaccggtaaccccgcttattaaaagcattctgtaacaaagcgggaccaaagccatgacaaaaacgcgtaacaaaagtgtctataatcacggcagaaaagtccacattgattatttgcacggcgtcacactttgctatgccatagcatttttatccataagattagcggatcctacctgacgctttttatcgcaactctctactgtttctccatacccgttttacctgcaggtgcagtctcataaacaggcgcagccattgggctgcaaggagatagacaacgtggcaaatcatgtatccgcactgaaacgtgcccgccaggatcaaaagaaacgtattcagaatcgtgcccagaagtcggctatgcgtactgccgtcaagcaggtgctggtggctgtagaggcaggagacaagcaggctgcatccgatgcgctgaagcaggcgacgtccttgcttgaccgtgccggccgcaagaaccagatgcatccgcgtcaggcttcccgccgtgtttcccgcctgaatgcccatgttaaggctattggctaatatacctaatttttcggaggtaacaaatatggcaactgtgattcgcctgagccgtggtggacgcaagaagcgtcctttttattctgtagtcgtcatggacggccgcaagcgtcgtgatggcgcatttatcgagaagctcggttattttgatccgtgcaaagatcctgaagtgatccagctggaccttgagcgtgtgaaagcatggaccgatcagggtgcccaggtatccgatcgcgtggctagcctgatcgccaaggcatccgcgtaatcagcttgacttaattaacggcactcctcagccaagtcaaaagcctccggtcggaggcttttgactacatgcccatggcgtttacgctccgccctgccactcatcgcagtactgttgtaattcattaagcattctgccgacatggaagccatcacaaacggcatgatgaacctgaatcgccagcggcatcagcaccttgtcgccttgcgtataatatttgcccatagtgaaaacgggggcgaagaagttgtccatattggccacgtttaaatcaaaactggtgaaactcacccagggattggctgagacgaaaaacatattctcaataaaccctttagggaaataggccaggttttcaccgtaacacgccacatcttgcgaatatatgtgtagaaactgccggaaatcgtcgtggtattcactccagagcgatgaaaacgtttcagtttgctcatggaaaacggtgtaacaagggtgaacactatcccatatcaccagctcaccgtctttcattgccatacggaactccggatgagcattcatcaggcgggcaagaatgtgaataaaggccggataaaacttgtgcttatttttctttacggtctttaaaaaggccgtaatatccagctgaacggtctggttataggtacattgagcaactgactgaaatgcctcaaaatgttctttacgatgccattgggatatatcaacggtggtatatccagtgatttttttctccattttagcttccttagctcctgaaaatctcgataactcaaaaaatacgcccggtagtgatcttatttcattatggtgaaagttggaacctcttacgtgccaagccaaataggccgt

SEQ ID NO: 194 - DNA, 6619 bp, Artificial
  Synthetic
tcagatccttccgtatttagccagtatgttctctagtgtggttcgttgtttttgcgtgagccatgagaacgaaccattgagatcatgcttactttgcatgtcactcaaaaattttgcctcaaaactggtgagctgaatttttgcagttaaagcatcgtgtagtgtttttcttagtccgttacgtaggtaggaatctgatgtaatggttgttggtattttgtcaccattcatttttatctggttgttctcaagttcggttacgagatccatttgtctatctagttcaacttggaaaatcaacgtatcagtcgggcggcctcgcttatcaaccaccaatttcatattgctgtaagtgtttaaatctttacttattggtttcaaaacccattggttaagccttttaaactcatggtagttattttcaagcattaacatgaacttaaattcatcaaggctaatctctatatttgccttgtgagttttcttttgtgttagttcttttaataaccactcataaatcctcatagagtatttgttttcaaaagacttaacatgttccagattatattttatgaatttttttaactggaaaagataaggcaatatctcttcactaaaaactaattctaatttttcgcttgagaacttggcatagtttgtccactggaaaatcttaaagcctttaaccaaaggattcctgatttccacagttctcgtcatcagctctctggttgctttagctaatacaccataagcattttccctactgatgttcatcatctgagcgtattggttataagtgaacgataccgtccgttctttccttgtagggttttcaatcgtggggttgagtagtgccacacagcataaaattagcttggtttcatgctccgttaagtcatagcgactaatcgctagttcatttgctttgaaaacaactaattcagacatacatctcaattggtctaggtgattttaatcactataccaattgagatgggctagtcaatgataattactagtccttttcctttgagttgtgggtatctgtaaattctgctagacctttgctggaaaacttgtaaattctgctagaccctctgtaaattccgctagacctttgtgtgttttttttgtttatattcaagtggttataatttatagaataaagaaagaataaaaaaagataaaaagaatagatcccagccctgtgtataactcactactttagtcagttccgcagtattacaaaaggatgtcgcaaacgctgtttgctcctctacaaaacagaccttaaaaccctaaaggcttaagtagcaccctcgcaagctcgggcaaatcgctgaatattccttttgtctccgaccatcaggcacctgagtcgctgtctttttcgtgacattcagttcgctgcgctcacggctctggcagtgaatgggggtaaatggcactacaggcgccttttatggattcatgcaaggaaactacccataatacaagaaaagcccgtcacgggcttctcagggcgttttatggcgggtctgctatgtggtgctatctgactttttgctgttcagcagttcctgccctctgattttccagtctgaccacttcggattatcccgtgacaggtcattcagactggctaatgcacccagtaaggcagcggtatcatcaacaggcttacccgtcttactgtcaagaggacatccggtcaaataaaacgaaaggctcagtcgaaagactgggcctttcgttttgctgaggagacttagggaccctttatgacaacttgacggctacatcattcactttttcttcacaaccggcacggaactcgctcgggctggccccggtgcattttttaaatacccgcgagaaatagagttgatcgtcaaaaccaacattgcgaccgacggtggcgataggcatccgggtggtgctcaaaagcagcttcgcctggctgatacgttggtcctcgcgccagcttaagacgctaatccctaactgctggcggaaaagatgtgacagacgcgacggcgacaagcaaacatgctgtgcgacgctggcgatatcaaaattgctgtctgccaggtgatcgctgatgtactgacaagcctcgcgtacccgattatccatcggtggatggagcgactcgttaatcgcttccatgcgccgcagtaacaattgctcaagcagatttatcgccagcagctccgaatagcgcccttccccttgcccggcgttaatgatttgcccaaacaggtcgctgaaatgcggctggtgcgcttcatccgggcgaaagaaccccgtattggcaaatattgacggccagttaagccattcatgccagtaggcgcgcggacgaaagtaaacccactggtgataccattcgcgagcctccggatgacgaccgtagtgatgaatctctcctggcgggaacagcaaaatatcacccggtcggcaaacaaattctcgtccctgatttttcaccaccccctgaccgcgaatggtgagattgagaatataacctttcattcccagcggtcggtcgataaaaaaatcgagataaccgttggcctcaatcggcgttaaacccgccaccagatgggcattaaacgagtatcccggcagcaggggatcattttgcgcttcagccatacttttcatactcccaccattcagagaagaaaccaattgtccatattgcatcagacattgccgtcactgcgtcttttactggctcttctcgctaacccaaccggtaaccccgcttattaaaagcattctgtaacaaagcgggaccaaagccatgacaaaaacgcgtaacaaaagtgtctataatcacggcagaaaagtccacattgattatttgcacggcgtcacactttgctatgccatagcatttttatccataagattagcggatcctacctgacgctttttatcgcaactctctactgtttctccatacccgttttacctgcaggtgcagtctcataaacaggcgcagccattgggctgcaaggagatagacaacgtggcaaatcatgtatccgcactgaaacgtgcccgccaggatcaaaagaaacgtattcagaatcgtgcccagaagtcggctatgcgtactgccgtcaagcaggtgctggtggctgtagaggcaggagacaagcaggctgcatccgatgcgctgaagcaggcgacgtccttgcttgaccgtgccggccgcaagaaccagatgcatccgcgtcaggcttcccgccgtgtttcccgcctgaatgcccatgttaaggctattggctaatatacctaatttttcggaggtaacaaatatggcaactgtgattcgcctgagccgtggtggacgcaagaagcgtcctttttattctgtagtcgtcatggacggccgcaagcgtcgtgatggcgcatttatcgagaagctcggttattttgatccgtgcaaagatcctgaagtgatccagctggaccttgagcgtgtgaaagcatggaccgatcagggtgcccaggtatccgatcgcgtggctagcctgatcgccaaggcatccgcgtaatcagcttgagtcattaggatggtacaccatgagtgaagccgagaagctcgacacgatacagaaagcagggggtgaggcggatgttgtcgataccgcttcagcaactgcagaggcaacccctgaggtcgtcgtagcagaaaccgaaaccactgcagcagcacctgctgcagaagagccggtcgtacaggccagtgaagagtcagatgagactcctgctgaagaggccgttagcgaagaggactctttcaggctgctgtacgaggcttccctgaaggagaaaggcgagattcgcaagggtgagatggtcaccggcatggtggtgggcctgaatgccgatgttgtcgtcattgacgtagggaccaaggccgaaggcacgattccgctggctgaattcgagcaggccgggctgccggttccggcaatcggcacagaaatcaaggcattgatccagtcggttggcggctcttcgggtgtgagcttgtccgtgctggccatcagacagcgcgaggcatgggatgccattgaagcggctgtggccgatgagagtacggtggatgcggtcatcacatcggaagtcaagggcggttaccgggtcagcctgagcgggttgaatgcatttatgccgcgctccgaagcggatacggatatccatgtcctgccggctaatctgattggtaaggcatgcaaggtggctgtactggaagcgcggcgcaggccggaaaatattgttgtatcacgcaggcgtccgttgactgccgctctggaagtcgagcgcgcggccttcttcgcacagcatgcggtgggtgacaggctgagcggtgaagtgaagcggctggctgatttcggtgcttttgtcgatatcggtggtgtggatgcattgctgcacgtatccgatgtgtcgtggcgccggatcaagcacccgtcggagatgctcagcgtcggtcagagcgtgagtgttgagatcgtcaagttgaatgcggaaaccgggaaagtgtcggtgtctatgaaggcactgcagtcggatccgtgggataatgtagaagcaatctatgagccgggcatggggctgaccggcaccgtgcgccgcctgctcgatttcggtgctgttgtggagctggagcccggcattgagggtatgattcaccgttctgagctgagctggacaaatcgtgatgtgaatccggcggctgtgctggctgaaggtgatgtggtggatgtggtggtgctggaagttgatgcatcggcccgtcgtattcgtctgagcctgaaggctgtcagcgaaaatccgtggcagcagtggatggcagatcatccgattggcacgcatgtcagtggcaagatcaagaacatcactgacttcggtttctttgtgcatgtggctgatggtatggatggcctggtgcatatggagaacctctcctgggagaagtccggagcggctgctatggagccttacagcaagggacaggaagtcgaagcggttgtgttgggcgtggatgttgaaaaacagcgcatcgcgctgggcatcaagcagctctcggccgatccgtttgaactgtttctggccggcgtcaagcgtggcaatagcgttaatggtaccgtggtcgatgtgaaacctgccggcgtggtcgtggagttggccgatggcgtacaggcattcatgccgatgcgtgaagtcccgcgcgatcacggcgaattgaaagtcggttccgaagtggaagcgaagattgtcgaagtgaataacaagcgtcgtcaggttacgctctccattcgtcagcatctgattcaggaagagcgggaggctatgcgcaactattcccgtcagaccgctgaggaatccgctccgtcggcactggcgctggagttgcagcgtaaactctttggcaagaagtaagccgatataaataagaggaagaacgttcatgtctttggcgctggaagaaaaaaacacaatcattgaaaattttcgtcgtaatgaaggcgataccggttcaccggaagtgcaggttgccctgttgacggagcgtatcaatcagctcggcggtcacttcaaggacaaccacaaggaccatcactcacgccgcggcctgcttaaaatggtcggtcagcgccgtaacctgcttaaatatttgaagaaagaagattttagtcgttatcgtaccctgatcgaaagtctgggactgcgtcgctaaacagtttcacttaattaacggcactcctcagccaagtcaaaagcctccggtcggaggcttttgactacatgcccatggcgtttacgctccgccctgccactcatcgcagtactgttgtaattcattaagcattctgccgacatggaagccatcacaaacggcatgatgaacctgaatcgccagcggcatcagcaccttgtcgccttgcgtataatatttgcccatagtgaaaacgggggcgaagaagttgtccatattggccacgtttaaatcaaaactggtgaaactcacccagggattggctgagacgaaaaacatattctcaataaaccctttagggaaataggccaggttttcaccgtaacacgccacatcttgcgaatatatgtgtagaaactgccggaaatcgtcgtggtattcactccagagcgatgaaaacgtttcagtttgctcatggaaaacggtgtaacaagggtgaacactatcccatatcaccagctcaccgtctttcattgccatacggaactccggatgagcattcatcaggcgggcaagaatgtgaataaaggccggataaaacttgtgcttatttttctttacggtctttaaaaaggccgtaatatccagctgaacggtctggttataggtacattgagcaactgactgaaatgcctcaaaatgttctttacgatgccattgggatatatcaacggtggtatatccagtgatttttttctccattttagcttccttagctcctgaaaatctcgataactcaaaaaatacgcccggtagtgatcttatttcattatggtgaaagttggaacctcttacgtgccaagccaaataggccgt

SEQ ID NO: 195 - DNA, 5906 bp, Artificial
  Synthetic
tcagatccttccgtatttagccagtatgttctctagtgtggttcgttgtttttgcgtgagccatgagaacgaaccattgagatcatgcttactttgcatgtcactcaaaaattttgcctcaaaactggtgagctgaatttttgcagttaaagcatcgtgtagtgtttttcttagtccgttacgtaggtaggaatctgatgtaatggttgttggtattttgtcaccattcatttttatctggttgttctcaagttcggttacgagatccatttgtctatctagttcaacttggaaaatcaacgtatcagtcgggcggcctcgcttatcaaccaccaatttcatattgctgtaagtgtttaaatctttacttattggtttcaaaacccattggttaagccttttaaactcatggtagttattttcaagcattaacatgaacttaaattcatcaaggctaatctctatatttgccttgtgagttttcttttgtgttagttcttttaataaccactcataaatcctcatagagtatttgttttcaaaagacttaacatgttccagattatattttatgaatttttttaactggaaaagataaggcaatatctcttcactaaaaactaattctaatttttcgcttgagaacttggcatagtttgtccactggaaaatcttaaagcctttaaccaaaggattcctgatttccacagttctcgtcatcagctctctggttgctttagctaatacaccataagcattttccctactgatgttcatcatctgagcgtattggttataagtgaacgataccgtccgttctttccttgtagggttttcaatcgtggggttgagtagtgccacacagcataaaattagcttggtttcatgctccgttaagtcatagcgactaatcgctagttcatttgctttgaaaacaactaattcagacatacatctcaattggtctaggtgattttaatcactataccaattgagatgggctagtcaatgataattactagtccttttcctttgagttgtgggtatctgtaaattctgctagacctttgctggaaaacttgtaaattctgctagaccctctgtaaattccgctagacctttgtgtgttttttttgtttatattcaagtggttataatttatagaataaagaaagaataaaaaaagataaaaagaatagatcccagccctgtgtataactcactactttagtcagttccgcagtattacaaaaggatgtcgcaaacgctgtttgctcctctacaaaacagaccttaaaaccctaaaggcttaagtagcaccctcgcaagctcgggcaaatcgctgaatattccttttgtctccgaccatcaggcacctgagtcgctgtctttttcgtgacattcagttcgctgcgctcacggctctggcagtgaatgggggtaaatggcactacaggcgccttttatggattcatgcaaggaaactacccataatacaagaaaagcccgtcacgggcttctcagggcgttttatggcgggtctgctatgtggtgctatctgactttttgctgttcagcagttcctgccctctgattttccagtctgaccacttcggattatcccgtgacaggtcattcagactggctaatgcacccagtaaggcagcggtatcatcaacaggcttacccgtcttactgtcaagaggacatccggtcaaataaaacgaaaggctcagtcgaaagactgggcctttcgttttgctgaggagacttagggaccctttatgacaacttgacggctacatcattcactttttcttcacaaccggcacggaactcgctcgggctggccccggtgcattttttaaatacccgcgagaaatagagttgatcgtcaaaaccaacattgcgaccgacggtggcgataggcatccgggtggtgctcaaaagcagcttcgcctggctgatacgttggtcctcgcgccagcttaagacgctaatccctaactgctggcggaaaagatgtgacagacgcgacggcgacaagcaaacatgctgtgcgacgctggcgatatcaaaattgctgtctgccaggtgatcgctgatgtactgacaagcctcgcgtacccgattatccatcggtggatggagcgactcgttaatcgcttccatgcgccgcagtaacaattgctcaagcagatttatcgccagcagctccgaatagcgcccttccccttgcccggcgttaatgatttgcccaaacaggtcgctgaaatgcggctggtgcgcttcatccgggcgaaagaaccccgtattggcaaatattgacggccagttaagccattcatgccagtaggcgcgcggacgaaagtaaacccactggtgataccattcgcgagcctccggatgacgaccgtagtgatgaatctctcctggcgggaacagcaaaatatcacccggtcggcaaacaaattctcgtccctgatttttcaccaccccctgaccgcgaatggtgagattgagaatataacctttcattcccagcggtcggtcgataaaaaaatcgagataaccgttggcctcaatcggcgttaaacccgccaccagatgggcattaaacgagtatcccggcagcaggggatcattttgcgcttcagccatacttttcatactcccaccattcagagaagaaaccaattgtccatattgcatcagacattgccgtcactgcgtcttttactggctcttctcgctaacccaaccggtaaccccgcttattaaaagcattctgtaacaaagcgggaccaaagccatgacaaaaacgcgtaacaaaagtgtctataatcacggcagaaaagtccacattgattatttgcacggcgtcacactttgctatgccatagcatttttatccataagattagcggatcctacctgacgctttttatcgcaactctctactgtttctccatacccgttttacctgcaggtgcagtaaccctcgtggagaatttacatggcagttacgatgcgccaaatgctggaagcgggtgtccacttcggtcaccagacgcgcttctggaacccgaagatggctccgttcattttcggtcaccgcaacaagattcacatcatcaacctcgaaaagacgctgccgatgttcacggacgcacagaagtacgtgcgccagctggcagcgaaccgcggcacgatcctgttcgtcggcacgaagcgccagtcgcgtgacacgatcgcccaggaagcgcaacgtgcgggcatgccgtacgtcaacgcacgctggctcggcggcatgatgaccaacttcaagacgctgaaggtatcgatcaagcgcctgaaggacatggaagcggccgtcgaatcgggcgaaaccgagaagatgagcaagaaggaagcgctgctgttcgaacgcgaaatcgccaagctgcagaagtcgatcggcggcgtgaaggacatgggcggcattccggacgcaattttcgtcgtcgacgtcggctaccacaagatcgccgtcacggaagcgaacaagctgggcgtgccggtcatcgccgtggtcgatacgaaccactcgccggaaggtgtggattacgtgatcccgggtaacgacgactcgagcaaggcagtcgcgctgtacgccgaaggcgtggccgacgcgatcctcgaaggccgcgcgaacgcggtcaacgaagtggtccaggccgcacgcggcgacgacgagtacgtcgaggaaaacgcgtaactggccccttcaatttcaggaataaacaatgccaaccatcaaccaactggttcgcaaaggccgtcagtcggaaacgacgaagagcaagagcccggccctgcaggactgcccccagcgtcgcggcgtgtgcacccgtgtgtacacgacgacgccgaagaagcctaactcggcactccgtaaggttgccaaggttcgtctgacgaacggcttcgaagtgatttcgtacatcggcggtgaaggccacaacctgcaggaacactcggttgtgctgatccgcggcggccgtgtgaaggacttgccgggtgtgcgttaccacatggttcgcggctcgctggatacccagggcgtcaaggaccgtaagcaagcgcgttcgaagtacggcgcgaagcgtgcaaaggctgccaagtaagcacttttggacaggataaggaaccgtcatggctaactccgcacaagcacgcaagcgcgcccgccaggccgcgaaggcaaactcgcacaactcggcgctgcgctcgaaattccgtaccgcgatcaagtcggttcgcaaggctgttgaagccggcgaccaggcaaaggctgccgagctgttcaaggctgccgtgaagacgatcgacacgatcgccgacaagaagatcgttcacaagaacaaggccgctcgcagcaagagccgcctggccgcagccgtcaagggcctgcaggcagcagcgtaactccggtggttttcccgaaggacatcatatggttatcatccgtctggctcgtggcggctcgaagaagcgcccgttctacaacatcgttgctaccgattcgcgcaaccgtcgtgacggccgcttcatcgagcgcgtcggcttctacaacccggtcgccacgaagggcgaatcgctgcgtatcgctcaggatcgcctgacgtactggcaaggcgttggcgcgcaactgtcgccgaccgtccagcgtctcgtgaaggaagcgcaaaaggcgcaaccggctgcctaacatggcacactcagaaggcgaaccagaaatgaacgatagcgtgaaaacctcgctgaagcggacgctggtcggtcgggtcgtcagcaacaagatggacaagaccgtcaccgtgctgatcgagcaccgcgtcaagcacccgatctacggcaagtatgtcgtgcgttcgaagaagtaccacgcgcacgatgaagcgaacacctacaacgaaggcgatctcgtcgaaatccaggaaacgcgtcctgtttcgaagacgaaggcctggacggtgtcgcgcctcgtcgaagccgctcgcgtcatctaagcggtagtacttaattaacggcactcctcagccaagtcaaaagcctccggtcggaggcttttgactacatgcccatggcgtttacgccccgccctgccactcatcgcagtactgttgtaattcattaagcattctgccgacatggaagccatcacaaacggcatgatgaacctgaatcgccagcggcatcagcaccttgtcgccttgcgtataatatttgcccatagtgaaaacgggggcgaagaagttgtccatattggccacgtttaaatcaaaactggtgaaactcacccagggattggctgagacgaaaaacatattctcaataaaccctttagggaaataggccaggttttcaccgtaacacgccacatcttgcgaatatatgtgtagaaactgccggaaatcgtcgtggtattcactccagagcgatgaaaacgtttcagtttgctcatggaaaacggtgtaacaagggtgaacactatcccatatcaccagctcaccgtctttcattgccatacggaactccggatgagcattcatcaggcgggcaagaatgtgaataaaggccggataaaacttgtgcttatttttctttacggtctttaaaaaggccgtaatatccagctgaacggtctggttataggtacattgagcaactgactgaaatgcctcaaaatgttctttacgatgccattgggatatatcaacggtggtatatccagtgatttttttctccattttagcttccttagctcctgaaaatctcgataactcaaaaaatacgcccggtagtgatcttatttcattatggtgaaagttggaacctcttacgtgccaggccaaataggccgt

SEQ ID NO: 196 - DNA, 4126 bp, Artificial
  Synthetic
tcagatccttccgtatttagccagtatgttctctagtgtggttcgttgtttttgcgtgagccatgagaacgaaccattgagatcatgcttactttgcatgtcactcaaaaattttgcctcaaaactggtgagctgaatttttgcagttaaagcatcgtgtagtgtttttcttagtccgttacgtaggtaggaatctgatgtaatggttgttggtattttgtcaccattcatttttatctggttgttctcaagttcggttacgagatccatttgtctatctagttcaacttggaaaatcaacgtatcagtcgggcggcctcgcttatcaaccaccaatttcatattgctgtaagtgtttaaatctttacttattggtttcaaaacccattggttaagccttttaaactcatggtagttattttcaagcattaacatgaacttaaattcatcaaggctaatctctatatttgccttgtgagttttcttttgtgttagttcttttaataaccactcataaatcctcatagagtatttgttttcaaaagacttaacatgttccagattatattttatgaatttttttaactggaaaagataaggcaatatctcttcactaaaaactaattctaatttttcgcttgagaacttggcatagtttgtccactggaaaatcttaaagcctttaaccaaaggattcctgatttccacagttctcgtcatcagctctctggttgctttagctaatacaccataagcattttccctactgatgttcatcatctgagcgtattggttataagtgaacgataccgtccgttctttccttgtagggttttcaatcgtggggttgagtagtgccacacagcataaaattagcttggtttcatgctccgttaagtcatagcgactaatcgctagttcatttgctttgaaaacaactaattcagacatacatctcaattggtctaggtgattttaatcactataccaattgagatgggctagtcaatgataattactagtccttttcctttgagttgtgggtatctgtaaattctgctagacctttgctggaaaacttgtaaattctgctagaccctctgtaaattccgctagacctttgtgtgttttttttgtttatattcaagtggttataatttatagaataaagaaagaataaaaaaagataaaaagaatagatcccagccctgtgtataactcactactttagtcagttccgcagtattacaaaaggatgtcgcaaacgctgtttgctcctctacaaaacagaccttaaaaccctaaaggcttaagtagcaccctcgcaagctcgggcaaatcgctgaatattccttttgtctccgaccatcaggcacctgagtcgctgtctttttcgtgacattcagttcgctgcgctcacggctctggcagtgaatgggggtaaatggcactacaggcgccttttatggattcatgcaaggaaactacccataatacaagaaaagcccgtcacgggcttctcagggcgttttatggcgggtctgctatgtggtgctatctgactttttgctgttcagcagttcctgccctctgattttccagtctgaccacttcggattatcccgtgacaggtcattcagactggctaatgcacccagtaaggcagcggtatcatcaacaggcttacccgtcttactgtcaagaggacatccggtcaaataaaacgaaaggctcagtcgaaagactgggcctttcgttttgctgaggagacttagggaccctttatgacaacttgacggctacatcattcactttttcttcacaaccggcacggaactcgctcgggctggccccggtgcattttttaaatacccgcgagaaatagagttgatcgtcaaaaccaacattgcgaccgacggtggcgataggcatccgggtggtgctcaaaagcagcttcgcctggctgatacgttggtcctcgcgccagcttaagacgctaatccctaactgctggcggaaaagatgtgacagacgcgacggcgacaagcaaacatgctgtgcgacgctggcgatatcaaaattgctgtctgccaggtgatcgctgatgtactgacaagcctcgcgtacccgattatccatcggtggatggagcgactcgttaatcgcttccatgcgccgcagtaacaattgctcaagcagatttatcgccagcagctccgaatagcgcccttccccttgcccggcgttaatgatttgcccaaacaggtcgctgaaatgcggctggtgcgcttcatccgggcgaaagaaccccgtattggcaaatattgacggccagttaagccattcatgccagtaggcgcgcggacgaaagtaaacccactggtgataccattcgcgagcctccggatgacgaccgtagtgatgaatctctcctggcgggaacagcaaaatatcacccggtcggcaaacaaattctcgtccctgatttttcaccaccccctgaccgcgaatggtgagattgagaatataacctttcattcccagcggtcggtcgataaaaaaatcgagataaccgttggcctcaatcggcgttaaacccgccaccagatgggcattaaacgagtatcccggcagcaggggatcattttgcgcttcagccatacttttcatactcccaccattcagagaagaaaccaattgtccatattgcatcagacattgccgtcactgcgtcttttactggctcttctcgctaacccaaccggtaaccccgcttattaaaagcattctgtaacaaagcgggaccaaagccatgacaaaaacgcgtaacaaaagtgtctataatcacggcagaaaagtccacattgattatttgcacggcgtcacactttgctatgccatagcatttttatccataagattagcggatcctacctgacgctttttatcgcaactctctactgtttctccatacccgttttacctgcaggtgcagtgttttcccgaaggacatcatatggttatcatccgtctggctcgtggcggctcgaagaagcgcccgttctacaacatcgttgctaccgattcgcgcaaccgtcgtgacggccgcttcatcgagcgcgtcggcttctacaacccggtcgccacgaagggcgaatcgctgcgtatcgctcaggatcgcctgacgtactggcaaggcgttggcgcgcaactgtcgccgaccgtccagcgtctcgtgaaggaagcgcaaaaggcgcaaccggctgcctaacatggcacacttaattaacggcactcctcagccaagtcaaaagcctccggtcggaggcttttgactacatgcccatggcgtttacgccccgccctgccactcatcgcagtactgttgtaattcattaagcattctgccgacatggaagccatcacaaacggcatgatgaacctgaatcgccagcggcatcagcaccttgtcgccttgcgtataatatttgcccatagtgaaaacgggggcgaagaagttgtccatattggccacgtttaaatcaaaactggtgaaactcacccagggattggctgagacgaaaaacatattctcaataaaccctttagggaaataggccaggttttcaccgtaacacgccacatcttgcgaatatatgtgtagaaactgccggaaatcgtcgtggtattcactccagagcgatgaaaacgtttcagtttgctcatggaaaacggtgtaacaagggtgaacactatcccatatcaccagctcaccgtctttcattgccatacggaactccggatgagcattcatcaggcgggcaagaatgtgaataaaggccggataaaacttgtgcttatttttctttacggtctttaaaaaggccgtaatatccagctgaacggtctggttataggtacattgagcaactgactgaaatgcctcaaaatgttctttacgatgccattgggatatatcaacggtggtatatccagtgatttttttctccattttagcttccttagctcctgaaaatctcgataactcaaaaaatacgcccggtagtgatcttatttcattatggtgaaagttggaacctcttacgtgccaagccaaataggccgt

SEQ ID NO: 197 - DNA, 6466 bp, Artificial
  Synthetic
tcagatccttccgtatttagccagtatgttctctagtgtggttcgttgtttttgcgtgagccatgagaacgaaccattgagatcatgcttactttgcatgtcactcaaaaattttgcctcaaaactggtgagctgaatttttgcagttaaagcatcgtgtagtgtttttcttagtccgttacgtaggtaggaatctgatgtaatggttgttggtattttgtcaccattcatttttatctggttgttctcaagttcggttacgagatccatttgtctatctagttcaacttggaaaatcaacgtatcagtcgggcggcctcgcttatcaaccaccaatttcatattgctgtaagtgtttaaatctttacttattggtttcaaaacccattggttaagccttttaaactcatggtagttattttcaagcattaacatgaacttaaattcatcaaggctaatctctatatttgccttgtgagttttcttttgtgttagttcttttaataaccactcataaatcctcatagagtatttgttttcaaaagacttaacatgttccagattatattttatgaatttttttaactggaaaagataaggcaatatctcttcactaaaaactaattctaatttttcgcttgagaacttggcatagtttgtccactggaaaatcttaaagcctttaaccaaaggattcctgatttccacagttctcgtcatcagctctctggttgctttagctaatacaccataagcattttccctactgatgttcatcatctgagcgtattggttataagtgaacgataccgtccgttctttccttgtagggttttcaatcgtggggttgagtagtgccacacagcataaaattagcttggtttcatgctccgttaagtcatagcgactaatcgctagttcatttgctttgaaaacaactaattcagacatacatctcaattggtctaggtgattttaatcactataccaattgagatgggctagtcaatgataattactagtccttttcctttgagttgtgggtatctgtaaattctgctagacctttgctggaaaacttgtaaattctgctagaccctctgtaaattccgctagacctttgtgtgttttttttgtttatattcaagtggttataatttatagaataaagaaagaataaaaaaagataaaaagaatagatcccagccctgtgtataactcactactttagtcagttccgcagtattacaaaaggatgtcgcaaacgctgtttgctcctctacaaaacagaccttaaaaccctaaaggcttaagtagcaccctcgcaagctcgggcaaatcgctgaatattccttttgtctccgaccatcaggcacctgagtcgctgtctttttcgtgacattcagttcgctgcgctcacggctctggcagtgaatgggggtaaatggcactacaggcgccttttatggattcatgcaaggaaactacccataatacaagaaaagcccgtcacgggcttctcagggcgttttatggcgggtctgctatgtggtgctatctgactttttgctgttcagcagttcctgccctctgattttccagtctgaccacttcggattatcccgtgacaggtcattcagactggctaatgcacccagtaaggcagcggtatcatcaacaggcttacccgtcttactgtcaagaggacatccggtcaaataaaacgaaaggctcagtcgaaagactgggcctttcgttttgctgaggagacttagggaccctttatgacaacttgacggctacatcattcactttttcttcacaaccggcacggaactcgctcgggctggccccggtgcattttttaaatacccgcgagaaatagagttgatcgtcaaaaccaacattgcgaccgacggtggcgataggcatccgggtggtgctcaaaagcagcttcgcctggctgatacgttggtcctcgcgccagcttaagacgctaatccctaactgctggcggaaaagatgtgacagacgcgacggcgacaagcaaacatgctgtgcgacgctggcgatatcaaaattgctgtctgccaggtgatcgctgatgtactgacaagcctcgcgtacccgattatccatcggtggatggagcgactcgttaatcgcttccatgcgccgcagtaacaattgctcaagcagatttatcgccagcagctccgaatagcgcccttccccttgcccggcgttaatgatttgcccaaacaggtcgctgaaatgcggctggtgcgcttcatccgggcgaaagaaccccgtattggcaaatattgacggccagttaagccattcatgccagtaggcgcgcggacgaaagtaaacccactggtgataccattcgcgagcctccggatgacgaccgtagtgatgaatctctcctggcgggaacagcaaaatatcacccggtcggcaaacaaattctcgtccctgatttttcaccaccccctgaccgcgaatggtgagattgagaatataacctttcattcccagcggtcggtcgataaaaaaatcgagataaccgttggcctcaatcggcgttaaacccgccaccagatgggcattaaacgagtatcccggcagcaggggatcattttgcgcttcagccatacttttcatactcccaccattcagagaagaaaccaattgtccatattgcatcagacattgccgtcactgcgtcttttactggctcttctcgctaacccaaccggtaaccccgcttattaaaagcattctgtaacaaagcgggaccaaagccatgacaaaaacgcgtaacaaaagtgtctataatcacggcagaaaagtccacattgattatttgcacggcgtcacactttgctatgccatagcatttttatccataagattagcggatcctacctgacgctttttatcgcaactctctactgtttctccatacccgttttacctgcaggtgcagtggacaggataaggaaccgtcatggctaactccgcacaagcacgcaagcgcgcccgccaggccgcgaaggcaaactcgcacaactcggcgctgcgctcgaaattccgtaccgcgatcaagtcggttcgcaaggctgttgaagccggcgaccaggcaaaggctgccgagctgttcaaggctgccgtgaagacgatcgacacgatcgccgacaagaagatcgttcacaagaacaaggccgctcgcagcaagagccgcctggccgcagccgtcaagggcctgcaggcagcagcgtaactccggtggttttcccgaaggacatcatatggttatcatccgtctggctcgtggcggctcgaagaagcgcccgttctacaacatcgttgctaccgattcgcgcaaccgtcgtgacggccgcttcatcgagcgcgtcggcttctacaacccggtcgccacgaagggcgaatcgctgcgtatcgctcaggatcgcctgacgtactggcaaggcgttggcgcgcaactgtcgccgaccgtccagcgtctcgtgaaggaagcgcaaaaggcgcaaccggctgcctaacatggcacccatgcacaatcagatttttatgtccgacctgcaaacctccaccccgaataccgaatcctttgcggctctgttcgaagagtcgctgacccgccaagacatgcgcgccggcgaagtgatttccgccgaagtcgtgcgcgtcgaccacaacttcgtggtcgtcaatgcaggcctgaagtccgaggcttacattccgatcgaggaattcctgaacgatcagggcgaggttgaggtgcagtcgggcgatttcgtgtccgtcgcgatcgacgcactcgaaaacggctatggcgacacgatcctgtcgcgcgacaaggcgaagcgccttgcatcgtggctgtcgctggaaaaggcgctcgacaacaacgagctcgtcaccggcacgatcaccggcaaggtgaagggcggcatgaccgtgatggtcaacggcatccgcgcgttcctgccgggttcgctggtcgacacgcgtccggtcaaggacacgaccccgtacgaaggcaagacgctcgagttccgcgtgatcaagctcgatcgcaagcgtaacaacgtcgtgctgtcgcgtcgtgcagtgatcgaagcaacgcaaggcgaagagcgcgcgaagctgctcgagacgctgaaggaaggcgcgatcgtcaacggcgtggtcaagaacatcaccgactacggcgcgttcgtcgacctcggcggtatcgacggcctgctgcacatcaccgacatcgcatggcgtcgtgtgcgtcacccgagcgaagtcctgtcggttggccaggaagtcaccgcgaagatcctcaagttcgaccaagagaagaaccgcgtctcgctgggcatcaagcaactgggcgacgatccgtgggaaggcatctcgcgccgttacccgtcgggcacgcgcctgttcggcaaggtcacgaacatcaccgactacggcgcattcgtcgaagtggaatcgggcatcgaaggcctcgtccacgtgtcggaaatggactggaccaacaagaacgttgcgccgtcgaaggttgtccagctgggcgacgaagtcgaagtcatggtcctcgagatcgacgaagaccgtcgtcgtatcagcctcggcatgaagcagtgcaagccgaatccgtgggatgacttcagccgcaacttcaagaagggcgacaagatcacgggcgcaatcaagtcgatcaccgacttcggcgtgttcatcggtctgccgggcggcatcgacggcttggtccacctgtcggacctgtcgtggagcgaagccggcgaagaagccgttcgcaagtacaagaagggcgacgaagtcgaagcaatcgtgctcggtatcgacgtcgagaaggagcgcatttcgctcggcatcaagcagctcgaaggcgacccgttcagcaactacgttgcaatgaacgacaagggctcgatcgtcgacggcgtcgtgaagacggtcgatgcgaagggtgcggtcgtcacgctgacgggcgacatcgaaggctacctgcgtgcgtcggaaatctcgcaggatcgcgtcgaagatgcacgcaacgtgctgaaggaaggcgacaaggtcaacgcgatggtgatcaacatcgatcgcaagtcgcgcggcatcaacctgtcgatcaaggcgaaggattcggccgaacaacaggaagcgatccgcggcctgcagtcggactccagcgctgctgcgaccggtacgaccaacctcggcgcgctgctgaaggcgaagctcgacggccagaaccagtaagccttacgtcagttagaaaggaaatcacatgtctgttgcagatatcaagaagtcggaagtcgttgctcagttcgcccgcggtaccaacgacacggggtcgcccgaagtccaggtcgcactgctgaccgcacgtatcgtcgaactgacgggtcacttcaagacccacgcgaaggatcaccacagccgccgcggcctgctgcgcatggtgagccgccgccgcaagctgctcgactacctcaagggcaaggatgccgaccgttaccgcgcactgatcgagaagctgggtctgcgtaagtaatcgaggcgacttaattaacggcactcctcagccaagtcaaaagcctccggtcggaggcttttgactacatgcccatggcgtttacgccccgccctgccactcatcgcagtactgttgtaattcattaagcattctgccgacatggaagccatcacaaacggcatgatgaacctgaatcgccagcggcatcagcaccttgtcgccttgcgtataatatttgcccatagtgaaaacgggggcgaagaagttgtccatattggccacgtttaaatcaaaactggtgaaactcacccagggattggctgagacgaaaaacatattctcaataaaccctttagggaaataggccaggttttcaccgtaacacgccacatcttgcgaatatatgtgtagaaactgccggaaatcgtcgtggtattcactccagagcgatgaaaacgtttcagtttgctcatggaaaacggtgtaacaagggtgaacactatcccatatcaccagctcaccgtctttcattgccatacggaactccggatgagcattcatcaggcgggcaagaatgtgaataaaggccggataaaacttgtgcttatttttctttacggtctttaaaaaggccgtaatatccagctgaacggtctggttataggtacattgagcaactgactgaaatgcctcaaaatgttctttacgatgccattgggatatatcaacggtggtatatccagtgatttttttctccattttagcttccttagctcctgaaaatctcgataactcaaaaaatacgcccggtagtgatcttatttcattatggtgaaagttggaacctcttacgtgccaggccaaataggccgt

SEQ ID NO: 198 - DNA, 6406 bp, Artificial
  Synthetic
tcagatccttccgtatttagccagtatgttctctagtgtggttcgttgtttttgcgtgagccatgagaacgaaccattgagatcatgcttactttgcatgtcactcaaaaattttgcctcaaaactggtgagctgaatttttgcagttaaagcatcgtgtagtgtttttcttagtccgttacgtaggtaggaatctgatgtaatggttgttggtattttgtcaccattcatttttatctggttgttctcaagttcggttacgagatccatttgtctatctagttcaacttggaaaatcaacgtatcagtcgggcggcctcgcttatcaaccaccaatttcatattgctgtaagtgtttaaatctttacttattggtttcaaaacccattggttaagccttttaaactcatggtagttattttcaagcattaacatgaacttaaattcatcaaggctaatctctatatttgccttgtgagttttcttttgtgttagttcttttaataaccactcataaatcctcatagagtatttgttttcaaaagacttaacatgttccagattatattttatgaatttttttaactggaaaagataaggcaatatctcttcactaaaaactaattctaatttttcgcttgagaacttggcatagtttgtccactggaaaatcttaaagcctttaaccaaaggattcctgatttccacagttctcgtcatcagctctctggttgctttagctaatacaccataagcattttccctactgatgttcatcatctgagcgtattggttataagtgaacgataccgtccgttctttccttgtagggttttcaatcgtggggttgagtagtgccacacagcataaaattagcttggtttcatgctccgttaagtcatagcgactaatcgctagttcatttgctttgaaaacaactaattcagacatacatctcaattggtctaggtgattttaatcactataccaattgagatgggctagtcaatgataattactagtccttttcctttgagttgtgggtatctgtaaattctgctagacctttgctggaaaacttgtaaattctgctagaccctctgtaaattccgctagacctttgtgtgttttttttgtttatattcaagtggttataatttatagaataaagaaagaataaaaaaagataaaaagaatagatcccagccctgtgtataactcactactttagtcagttccgcagtattacaaaaggatgtcgcaaacgctgtttgctcctctacaaaacagaccttaaaaccctaaaggcttaagtagcaccctcgcaagctcgggcaaatcgctgaatattccttttgtctccgaccatcaggcacctgagtcgctgtctttttcgtgacattcagttcgctgcgctcacggctctggcagtgaatgggggtaaatggcactacaggcgccttttatggattcatgcaaggaaactacccataatacaagaaaagcccgtcacgggcttctcagggcgttttatggcgggtctgctatgtggtgctatctgactttttgctgttcagcagttcctgccctctgattttccagtctgaccacttcggattatcccgtgacaggtcattcagactggctaatgcacccagtaaggcagcggtatcatcaacaggcttacccgtcttactgtcaagaggacatccggtcaaataaaacgaaaggctcagtcgaaagactgggcctttcgttttgctgaggagacttagggaccctttatgacaacttgacggctacatcattcactttttcttcacaaccggcacggaactcgctcgggctggccccggtgcattttttaaatacccgcgagaaatagagttgatcgtcaaaaccaacattgcgaccgacggtggcgataggcatccgggtggtgctcaaaagcagcttcgcctggctgatacgttggtcctcgcgccagcttaagacgctaatccctaactgctggcggaaaagatgtgacagacgcgacggcgacaagcaaacatgctgtgcgacgctggcgatatcaaaattgctgtctgccaggtgatcgctgatgtactgacaagcctcgcgtacccgattatccatcggtggatggagcgactcgttaatcgcttccatgcgccgcagtaacaattgctcaagcagatttatcgccagcagctccgaatagcgcccttccccttgcccggcgttaatgatttgcccaaacaggtcgctgaaatgcggctggtgcgcttcatccgggcgaaagaaccccgtattggcaaatattgacggccagttaagccattcatgccagtaggcgcgcggacgaaagtaaacccactggtgataccattcgcgagcctccggatgacgaccgtagtgatgaatctctcctggcgggaacagcaaaatatcacccggtcggcaaacaaattctcgtccctgatttttcaccaccccctgaccgcgaatggtgagattgagaatataacctttcattcccagcggtcggtcgataaaaaaatcgagataaccgttggcctcaatcggcgttaaacccgccaccagatgggcattaaacgagtatcccggcagcaggggatcattttgcgcttcagccatacttttcatactcccaccattcagagaagaaaccaattgtccatattgcatcagacattgccgtcactgcgtcttttactggctcttctcgctaacccaaccggtaaccccgcttattaaaagcattctgtaacaaagcgggaccaaagccatgacaaaaacgcgtaacaaaagtgtctataatcacggcagaaaagtccacattgattatttgcacggcgtcacactttgctatgccatagcatttttatccataagattagcggatcctacctgacgctttttatcgcaactctctactgtttctccatacccgttttacctgcaggtgcagtagtttttgggagttagacccttggcaaataacaaatctgctaagaagcgcgctatccaagctgagaaacgtcgccagcacaatgctagccgtcgttctatgatgcgcacttacatgaagaaaactgttgctgcaatcgctgctggcgacaaagaagctgcaactgctgcattcgctgtagttacaccaatcctagaccgcatggcgactaaaggccttattcacaagaataaagcagctcgtcacaagtctcgcttctttgctgctatcaacgctctgtaatagagttttgaaatgcaaagaggacgacatggtaaccattcgtttggcacgtcacggcgcgaaaaagcgtccattctatcaaatcgttgtagctgacagccgcaactcagcaactggccgtttcatcgagaaagtaggtttctttaaccctactgctactggtcaagaagaaggcctgcgtctagacctagatcgcgtgaaccactgggtttcacaaggcgcatctctgtctgatcgcgtagcacagctagttaaaaccgctcaaaaagcggcttaattattactaattattgaagattaaataaatgactgaatcttttgctcaactctttgaagagtttctgaacgagacccaattccaacaaggtactatcgttaaaggtactgtagtagcaatcgagaacggctacgttctggttgatgctggcctgaagtctgagtctgctatccctgctgaacaattcaagaacgctgctggcgaactagaagttcaagtcggttctcaagtagacgtagctctggacgcggttgaagatggtttcggcgaaactcaactttctcgtgagaaagcgaagcgccatgaagcttggatcgtacttgaaaaagcttacgaagaagctgcaactgttatcggtatcattaacggtaaagttaaaggtggtttcactgttgaactgaacggtatccgtgcgttcctgccaggttctctggttgacgtacgtccaatccgtgacactgctcacttagaaaacaaagagctagagttcaaagttatcaagctagaccagaagcgtaacaacgttgttgtttctcgtcgtgcagttatcgaatctgaaagcagcgtagagcgtgatgaactgcttgaaactctgcaagaaggtactgaagttaaaggtatcgttaagaacctgactgactacggtgcgttcgttgatctgggcggcgttgacggtctgctacacatcactgacatggcttggaagcgcgttaagcatccatcagaaatcgttaacgttggtgacgagatcctagttaaagtactgaagttcgatcgtgatcgtactcgcgtatctctaggtctgaaacagctaggcgaagatccatgggtagcaatcgctaagcgttacccagaaggtcacaaactgtctggccgtgtaactaacctgactgactacggctgcttcgttgaaatcgaagaaggcgttgaaggtctagtacacgtttctgaaatggactggacgaacaagaacatccacccatctaaagttgttaatgttggcgacgaagttgaggttatggttctggatatcgacgaagagcgtcgtcgtatctctctaggcctgaaacagtgtaaagctaacccatggcaatcattcgctgaagcgcaagctaaaggcgacaaagtaactggtaagatcaagtctatcactgactttggtatcttcatcggtctagaaggcggtatcgacggtctggttcacctgtctgacatctcttggaacgtaccaggagaagaagctgttcgtgaattcaagaaaggcgacgaaatctctgcagttgttctagcagtagacgctgagcgtgagcgtatttctctgggcatcaagcaaatggaaaacgatccattcaacgcttatgtttcagacaacaagaaaggtgctctggttaacggtactgtaactgcagttgacgcgaaaggcgcaaccatcgagctagaagacggcgttgaaggttacatccgcgcttctgaagtatcacgtgaccgtatcgaagatgcatcactgatcctgaacgttggtgacaaagttgaagcgaaatttactggtgttgaccgtaaaaaccgcgtaatcaacctgtctatcaaagcgaaagatgaagctgaagagcaagaagtaatggcaactctgaacaagcaagatgaagctgcgttcggtaatgctatggctgacgctttcaaagcagcgaaaggcgaataatagccaaaaaactctttaggagagaattatgtctctgaatgcagaaactaaagcagcaatcgttgctgaatatgcacgttgcgaaaatgacacaggttcaccagaagtacagatcgctctactgactgcttctatcaaccacctgcaaggtcacttccaagcacacaaaggcgatcaccacagccgtcgtggtctgctacgtatggtttcaagccgtcgtaaactgctggactacctgaaaggtaaagatctgtctcgttaccaagatctgatcaaacgtctaggcctgcgtcgttaattcgtcgcacttaattaacggcactcctcagccaagtcaaaagcctccggtcggaggcttttgactacatgcccatggcgtttacgccccgccctgccactcatcgcagtactgttgtaattcattaagcattctgccgacatggaagccatcacaaacggcatgatgaacctgaatcgccagcggcatcagcaccttgtcgccttgcgtataatatttgcccatagtgaaaacgggggcgaagaagttgtccatattggccacgtttaaatcaaaactggtgaaactcacccagggattggctgagacgaaaaacatattctcaataaaccctttagggaaataggccaggttttcaccgtaacacgccacatcttgcgaatatatgtgtagaaactgccggaaatcgtcgtggtattcactccagagcgatgaaaacgtttcagtttgctcatggaaaacggtgtaacaagggtgaacactatcccatatcaccagctcaccgtctttcattgccatacggaactccggatgagcattcatcaggcgggcaagaatgtgaataaaggccggataaaacttgtgcttatttttctttacggtctttaaaaaggccgtaatatccagctgaacggtctggttataggtacattgagcaactgactgaaatgcctcaaaatgttctttacgatgccattgggatatatcaacggtggtatatccagtgatttttttctccattttagcttccttagctcctgaaaatctcgataactcaaaaaatacgcccggtagtgatcttatttcattatggtgaaagttggaacctcttacgtgccaggccaaataggccgt

SEQ ID NO: 199 - DNA, 6110 bp, Artificial
  Synthetic
tcagatccttccgtatttagccagtatgttctctagtgtggttcgttgtttttgcgtgagccatgagaacgaaccattgagatcatgcttactttgcatgtcactcaaaaattttgcctcaaaactggtgagctgaatttttgcagttaaagcatcgtgtagtgtttttcttagtccgttacgtaggtaggaatctgatgtaatggttgttggtattttgtcaccattcatttttatctggttgttctcaagttcggttacgagatccatttgtctatctagttcaacttggaaaatcaacgtatcagtcgggcggcctcgcttatcaaccaccaatttcatattgctgtaagtgtttaaatctttacttattggtttcaaaacccattggttaagccttttaaactcatggtagttattttcaagcattaacatgaacttaaattcatcaaggctaatctctatatttgccttgtgagttttcttttgtgttagttcttttaataaccactcataaatcctcatagagtatttgttttcaaaagacttaacatgttccagattatattttatgaatttttttaactggaaaagataaggcaatatctcttcactaaaaactaattctaatttttcgcttgagaacttggcatagtttgtccactggaaaatcttaaagcctttaaccaaaggattcctgatttccacagttctcgtcatcagctctctggttgctttagctaatacaccataagcattttccctactgatgttcatcatctgagcgtattggttataagtgaacgataccgtccgttctttccttgtagggttttcaatcgtggggttgagtagtgccacacagcataaaattagcttggtttcatgctccgttaagtcatagcgactaatcgctagttcatttgctttgaaaacaactaattcagacatacatctcaattggtctaggtgattttaatcactataccaattgagatgggctagtcaatgataattactagtccttttcctttgagttgtgggtatctgtaaattctgctagacctttgctggaaaacttgtaaattctgctagaccctctgtaaattccgctagacctttgtgtgttttttttgtttatattcaagtggttataatttatagaataaagaaagaataaaaaaagataaaaagaatagatcccagccctgtgtataactcactactttagtcagttccgcagtattacaaaaggatgtcgcaaacgctgtttgctcctctacaaaacagaccttaaaaccctaaaggcttaagtagcaccctcgcaagctcgggcaaatcgctgaatattccttttgtctccgaccatcaggcacctgagtcgctgtctttttcgtgacattcagttcgctgcgctcacggctctggcagtgaatgggggtaaatggcactacaggcgccttttatggattcatgcaaggaaactacccataatacaagaaaagcccgtcacgggcttctcagggcgttttatggcgggtctgctatgtggtgctatctgactttttgctgttcagcagttcctgccctctgattttccagtctgaccacttcggattatcccgtgacaggtcattcagactggctaatgcacccagtaaggcagcggtatcatcaacaggcttacccgtcttactgtcaagaggacatccggtcaaataaaacgaaaggctcagtcgaaagactgggcctttcgttttgctgaggagacttagggaccctttatgacaacttgacggctacatcattcactttttcttcacaaccggcacggaactcgctcgggctggccccggtgcattttttaaatacccgcgagaaatagagttgatcgtcaaaaccaacattgcgaccgacggtggcgataggcatccgggtggtgctcaaaagcagcttcgcctggctgatacgttggtcctcgcgccagcttaagacgctaatccctaactgctggcggaaaagatgtgacagacgcgacggcgacaagcaaacatgctgtgcgacgctggcgatatcaaaattgctgtctgccaggtgatcgctgatgtactgacaagcctcgcgtacccgattatccatcggtggatggagcgactcgttaatcgcttccatgcgccgcagtaacaattgctcaagcagatttatcgccagcagctccgaatagcgcccttccccttgcccggcgttaatgatttgcccaaacaggtcgctgaaatgcggctggtgcgcttcatccgggcgaaagaaccccgtattggcaaatattgacggccagttaagccattcatgccagtaggcgcgcggacgaaagtaaacccactggtgataccattcgcgagcctccggatgacgaccgtagtgatgaatctctcctggcgggaacagcaaaatatcacccggtcggcaaacaaattctcgtccctgatttttcaccaccccctgaccgcgaatggtgagattgagaatataacctttcattcccagcggtcggtcgataaaaaaatcgagataaccgttggcctcaatcggcgttaaacccgccaccagatgggcattaaacgagtatcccggcagcaggggatcattttgcgcttcagccatacttttcatactcccaccattcagagaagaaaccaattgtccatattgcatcagacattgccgtcactgcgtcttttactggctcttctcgctaacccaaccggtaaccccgcttattaaaagcattctgtaacaaagcgggaccaaagccatgacaaaaacgcgtaacaaaagtgtctataatcacggcagaaaagtccacattgattatttgcacggcgtcacactttgctatgccatagcatttttatccataagattagcggatcctacctgacgctttttatcgcaactctctactgtttctccatacccgttttacctgcaggtgcagtcaaattaggagaatttaaaaatgtcaaaaataccatctgttaacattaaagcattattagatgcgggcgtgcatttcggtcacaagacctcacgctggaatcctaaaatggcatcttatatatatggtgaacgtgatgatgttcatataatcgatttaagacaaagtgtcgctttaatgagcgttgctttgaatgcaatatatgaaactgtaaaaaaagacggtaaaatattatttgtaagtactaaaatacaggcaagcgatattatagcggaatatgccgaaaaatgcgggcagtattacgtaaatcatagatggcttggtggtatgctaactaactggaaaactattgcgggttcaatagaaaagctaaataagttagacaaaaccttagaaaacgaagaagcacttatgggttatactaagaaagagatactcaatatgagccgtaagaaagataaattacttctatctcttgccggtattagaaatcttaattctaaacctgatcttctagtagttattgacactaataaagagcatatcgcaattaatgaagcggtaaagcttaatgttcctatagttgcagtagttgatactaattctaatcctgataatgtagattatcctattccgggtaatgatgattctataagatcaataagactttattgtagtttatttgcagatgcggcattacaaggacttgaagaatcaatgaaagcttcaggagttgatatgggtgctatgcaagagcatacagataaggggttaacttctaaaaatgtttctaaattaaaacaagctaaaaaattctctaaaacgaaaaatattgatgaagagacaaatacagaatttgagcaagcattaaatgatgccgatgaaaataaaaattctgataatgcataagtgttgtttttttggagtattttttttaatgccgacatataatcaattagtacgttttgggagaaagtcaaaaactcgtaagaccaaatctcctgccttagaatctaatccttttaaaagcggtgtttgcctagttgtaaaaaccgttacccctaaaaagcctaactctgcacttcgtaagattgcaacggtgcgtttaagtaataaaagaaccgtaaatgcatatattcctggtgaaaagcatagtgtaaaggaacatgatagggtgttagtaagaggcggtcaggttcctgatcttccgggggtgaaatatcatatcgtactcggtgcttatgatattgccggagttaaaggacgtaagcaaggtcggtcacgttacggtgctcctcgtaaacaagttgcagttacaaaaaaataaattattagaaaatataagggactcggtgatggctaatcattcttcagcaaaaaaagctgttagacaaacagtaaaaagaactctaatcaataaaaaacgatctagtgcaataaagacttttataaagaaagttgtacatgaaatcagtcttggtaataaagaaaatgctaacatagctttatctgttgctcagtctaagataatgcaaggtgtgaaaaaaaatataattaaattaaataccgcctcaagaaaaatcagcagattatcaaggcaaataaaaagtttgaaagtaaataacactttatagtaatttaaataattgtaagtaatataatatggcagtaaaaattcgtttagctagaggcggtgctaaaaagcgtcctttttaccgtgtagtagtagctaacgcaacagcacctcgtgacggtgactttttagaaaaagtcggaacttatgatccaatgcttgcttcagataatagtgagcgtgttgttttaaaaaaagatcgtataaaatattggcttggcaccggtgctaaaccaactgagcgagtcgcaaaatttattgagcaagcgggtgttactcttcctgagaaagttaaaaaggaaatggaagtgaaagcaaaaaaccgcaaagctagactaagtaaaaaggaagctaaagaagcatagtttatagttaatagtgaggaatattaaaatgccgaaaagagtgttacaaggcgtggttataagttcaaaagctgataagacggttacagtaaaagtagaaagaaagtttaagcatcctatttataaaaaatttgtgaaagtatctaaaaaatatgctgctcatgattcagaaaataaatatcaagaaggagataaagttagtataattgaaagtcggcctatctcaaaaaccaaaacatgggtagtggtaaatggggaataaagttttttacttaattaacggcactcctcagccaagtcaaaagcctccggtcggaggcttttgactacatgcccatggcgtttacgccccgccctgccactcatcgcagtactgttgtaattcattaagcattctgccgacatggaagccatcacaaacggcatgatgaacctgaatcgccagcggcatcagcaccttgtcgccttgcgtataatatttgcccatagtgaaaacgggggcgaagaagttgtccatattggccacgtttaaatcaaaactggtgaaactcacccagggattggctgagacgaaaaacatattctcaataaaccctttagggaaataggccaggttttcaccgtaacacgccacatcttgcgaatatatgtgtagaaactgccggaaatcgtcgtggtattcactccagagcgatgaaaacgtttcagtttgctcatggaaaacggtgtaacaagggtgaacactatcccatatcaccagctcaccgtctttcattgccatacggaactccggatgagcattcatcaggcgggcaagaatgtgaataaaggccggataaaacttgtgcttatttttctttacggtctttaaaaaggccgtaatatccagctgaacggtctggttataggtacattgagcaactgactgaaatgcctcaaaatgttctttacgatgccattgggatatatcaacggtggtatatccagtgatttttttctccattttagcttccttagctcctgaaaatctcgataactcaaaaaatacgcccggtagtgatcttatttcattatggtgaaagttggaacctcttacgtgccaggccaaataggccgt

SEQ ID NO: 200 - DNA, 8880 bp, Artificial
  Synthetic
tcagatccttccgtatttagccagtatgttctctagtgtggttcgttgtttttgcgtgagccatgagaacgaaccattgagatcatgcttactttgcatgtcactcaaaaattttgcctcaaaactggtgagctgaatttttgcagttaaagcatcgtgtagtgtttttcttagtccgttacgtaggtaggaatctgatgtaatggttgttggtattttgtcaccattcatttttatctggttgttctcaagttcggttacgagatccatttgtctatctagttcaacttggaaaatcaacgtatcagtcgggcggcctcgcttatcaaccaccaatttcatattgctgtaagtgtttaaatctttacttattggtttcaaaacccattggttaagccttttaaactcatggtagttattttcaagcattaacatgaacttaaattcatcaaggctaatctctatatttgccttgtgagttttcttttgtgttagttcttttaataaccactcataaatcctcatagagtatttgttttcaaaagacttaacatgttccagattatattttatgaatttttttaactggaaaagataaggcaatatctcttcactaaaaactaattctaatttttcgcttgagaacttggcatagtttgtccactggaaaatcttaaagcctttaaccaaaggattcctgatttccacagttctcgtcatcagctctctggttgctttagctaatacaccataagcattttccctactgatgttcatcatctgagcgtattggttataagtgaacgataccgtccgttctttccttgtagggttttcaatcgtggggttgagtagtgccacacagcataaaattagcttggtttcatgctccgttaagtcatagcgactaatcgctagttcatttgctttgaaaacaactaattcagacatacatctcaattggtctaggtgattttaatcactataccaattgagatgggctagtcaatgataattactagtccttttcctttgagttgtgggtatctgtaaattctgctagacctttgctggaaaacttgtaaattctgctagaccctctgtaaattccgctagacctttgtgtgttttttttgtttatattcaagtggttataatttatagaataaagaaagaataaaaaaagataaaaagaatagatcccagccctgtgtataactcactactttagtcagttccgcagtattacaaaaggatgtcgcaaacgctgtttgctcctctacaaaacagaccttaaaaccctaaaggcttaagtagcaccctcgcaagctcgggcaaatcgctgaatattccttttgtctccgaccatcaggcacctgagtcgctgtctttttcgtgacattcagttcgctgcgctcacggctctggcagtgaatgggggtaaatggcactacaggcgccttttatggattcatgcaaggaaactacccataatacaagaaaagcccgtcacgggcttctcagggcgttttatggcgggtctgctatgtggtgctatctgactttttgctgttcagcagttcctgccctctgattttccagtctgaccacttcggattatcccgtgacaggtcattcagactggctaatgcacccagtaaggcagcggtatcatcaacaggcttacccgtcttactgtcaagaggacatccggtcaaataaaacgaaaggctcagtcgaaagactgggcctttcgttttgctgaggagacttagggaccctttatgacaacttgacggctacatcattcactttttcttcacaaccggcacggaactcgctcgggctggccccggtgcattttttaaatacccgcgagaaatagagttgatcgtcaaaaccaacattgcgaccgacggtggcgataggcatccgggtggtgctcaaaagcagcttcgcctggctgatacgttggtcctcgcgccagcttaagacgctaatccctaactgctggcggaaaagatgtgacagacgcgacggcgacaagcaaacatgctgtgcgacgctggcgatatcaaaattgctgtctgccaggtgatcgctgatgtactgacaagcctcgcgtacccgattatccatcggtggatggagcgactcgttaatcgcttccatgcgccgcagtaacaattgctcaagcagatttatcgccagcagctccgaatagcgcccttccccttgcccggcgttaatgatttgcccaaacaggtcgctgaaatgcggctggtgcgcttcatccgggcgaaagaaccccgtattggcaaatattgacggccagttaagccattcatgccagtaggcgcgcggacgaaagtaaacccactggtgataccattcgcgagcctccggatgacgaccgtagtgatgaatctctcctggcgggaacagcaaaatatcacccggtcggcaaacaaattctcgtccctgatttttcaccaccccctgaccgcgaatggtgagattgagaatataacctttcattcccagcggtcggtcgataaaaaaatcgagataaccgttggcctcaatcggcgttaaacccgccaccagatgggcattaaacgagtatcccggcagcaggggatcattttgcgcttcagccatacttttcatactcccaccattcagagaagaaaccaattgtccatattgcatcagacattgccgtcactgcgtcttttactggctcttctcgctaacccaaccggtaaccccgcttattaaaagcattctgtaacaaagcgggaccaaagccatgacaaaaacgcgtaacaaaagtgtctataatcacggcagaaaagtccacattgattatttgcacggcgtcacactttgctatgccatagcatttttatccataagattagcggatcctacctgacgctttttatcgcaactctctactgtttctccatacccgttttacctgcaggtgcagtttaaatattaggtttactgaatgaaaaataaaatcaaaattcgtttaaaatcatttgatcatcgtagtcttgatcaagctacaaaagagatagttagtgctgttaaaagaacgtttgctaacattaatggccctattcctttacctaaaaaaattggaagatttaccgtaaataggtctcctcatgtacataagaagtcaagagagcaatttgaaattagaaagcataaaagattattagttataggtgatccgaatccggcggtggtcgatgctttaagtaaagttgatttagcagcaggtgttgatgtagtgattgaattagagagtggggaataaatgagaaccggtataattgctcaaaaaattgggatgactagtgtttttaatgataaaggcgaaagaatttctttaacattagtaaaagttgatgattgtcaagtagtaggacataaaactctagaaaaacatggatataatgctttggttataggtgtaaaagataaaaaaatatctagagtaaccaaacctatgagacaagtttttgctaatgctaaaatatctcctaaaactaaattaaaagaatttagaatttctgaagagaattttattgatatagcagcaagtctagaagtagaccattttacggcaggacaatttgtggatataacggcaactactataggtaaaggatttgccggtagtatgaaaagacataattttagaggtcttgaagcttctcacggtgtttcgatatcccatcgttcgcatggttctacaggacaaagacaagatccaggaaaggttttcaaaggcaaaaaaatggccggtcatatgggatgtaaccaagttactattcaaaatttgaaaatatttgccgttgataaagagcgtaagcttattatgattcagggtagtatacccggtcacaaaaattcgtatctttcagtaaaagatgcaataaaaaagatttcaatcactgtataatagatatttagacatgtttgttgaggttaaaggttatcacgttaacaaaacgccatgcaatattatttatataaaagttttatataagactgtataaggttaaaataaagatgaaaactaaaatattaagtcttgctaatgaagaagttggtgagattagcttaaatgaagatatatttgctgttgaatttatcagagatgatataataaagcaggttattgattggcagagagctaaggcaatgtctggtaaccacaaaactaaaacagtatcagaagtattaggaaccacaaaaaaaccgtttaagcaaaaaggtacaggtaatgcaagacaaggctcccttagatcggtacagatgcgtggtggtggtgtagctcatggacctagagtacgtagtcatgcaacgaaattacctaaaaaagtacgaaaacttggtttaattcatgctttatctgagaaatgcgctgaaggaaaattattagtaatagattctttaaagttagataagcctaaaacttctgctcttgtaaatatattaaacaaatttcaaggaaaaagtttctttgtaatagatggaaatgaagtagatattaatttttctttagctgcaaaaaatatttataatactgtgattgttccacaaataggagccaatgtttatgatataatacgacatgaatatgtcctattatcacaagaagcagtgagtgttttagaagagaggttaagatgagttcttataaatactacgatttaattagaaaacctattattacagaaaaaactacaaccctttccgaacaaaataaatacgctttttatgtagataaatttgctaaaaaacttacccttaaaaaggctatagaagaaatatttaaagtaaaagtaaaaaaagtgaatattttaaacgttaaaggtaagaagaaaagatttaaaggaattatagggactcaaatcaatagaaagaaagctattgttacattagaaaaagaccataatatcgattttgccggaggaattaaataaatggctttaaaaaactttaatccaattactccttctcttagagagttagttcaagttgataaaactagtttatggaaaggcagacctttaaaatctttgaccaaaggtatatctaaaaccggtggacgaaataatcaaggtagaattacttcttggcacagaggtggaggacacaaaaagttatatcgtattattgattttaaaagaaataaaattgatatttctgctattgttgaaagaatagagtatgaccctaatagaactgcttttattgctttaataaaatatgaagatggggaatattcttatattctagcaccacaaaaattatctgtaggtgatagagtaatatcaagtcaagatgctgatataaaaataggaaattgtttacctttaaaatgcattcctatcggtactactttacataatgttgaaatgaaagtcggtaagggcggtcaaattgcaaggtctgcaggtacttcagtagatctagtgggtaaagattcaggatatgctcagattaaattaagatcaggtgaatttaggttagtacctttagattgtaaagctactataggtagtatatctaacccggatcaaaaaaatattaatttaggcaaagccggtagaaatagatggctaggttggagaccgcatgttagaggtgtagcaatgaatcctgtagatcaccctcatggtggtggtgaaggtaaaacttcaggaggtcgccatcctgttactccttggggattcccaacaaagggtaagaagacacgtaaaaataaacgtacttcaaaatttatcgtaaagaaaagaaaatagattttaaattaattaggtattagtatggcacgttcaatatggaaagggccttttgtagacggttatttaataaagaaagttcaaaaattaatggaatcaggtaaatatgaaatgattaaaacttggtctagaagatcaacgattttacctatttttgtagggtttaccttttctgtgcataatggaaataaatttattccggtttctgtaaatgaagaaatggttggaagaaaattaggtgagtttgctcctactagaacatttcacggtcatggagcagataaaaaaatcaaaagaaaataaagatttatatggtacaggaaaataaaaattttgctacggcacaagctaaatctattagagtaagttcaaggaagctcaatttagttgcagcctttattagaaatatgaaagtatctgaagcattggtacaattaactttttctcctaaaagaattgcaaaagttgtaaaagattgtttacaatctgctgttgcaaatgctgaaaataatttaggtctagatatagatagattggttattactaaagcgactgtaggtaaggctttagtaatgaaaagagttatgccaagagcaaaaggaagagcaactagaataaataagttttttagtaatctttatataactgttacagaaaaagaggataattaaaatggggcagaaagtttgtgcacatggttttagagttggaccgactttaattaaaggttgggattccatattatatgcagaaaaacattataaaactctttttatacaagatttaaaaattagggatttaataaataagggttttaatcaagcccaaattagtagagttttaattgaacgcccttctaataaaagtattataattaatattaatgccaaaaaaccaaatatcattatcggtagaaacggtagtgaaattgataagctaaaaaaagctatcgagaaaatgacttctttaaaagaagtttatataaatattcacgaagttcgaaaatttaatatagatgctgctatagtagctcaaactatagcactacagcttgaaaaaagagtttcttttagaaaagccatgaaaacagcaattcaggcgtcatttaaacaaggtggacaaggtatcagggttagttgttcaggacgacttggaggtgctgaaattgctagaaccgaatggtatatagaaggaagaatgccgttacatactttaagagctgatattgattattcaacagctgaggctataactacttatggagttataggggttaaagtgtggatttataaaggtgaatatacagaaaataaaagatataattaattttaagtattaaaatgttagctccgaaaaaacaaaaatttagaaaagctcataagggtagggttgcttcaacagcaaaagcaggtacgacgcttgcttttggatcatttggtctaaaatctatagatggttggcgtgttactgcaagacaaatagaagcaggaagaaaagctgctactagatgtatgaaaaggcaaggaagattatggattcgcatttttccggatgttcccgtttctaaaaagcctgccgaagtaagaatgggtaaaggtaaaggttctcctgaattttttgcagttagagtttcgcctggaagaattatgtttgaaattgaaggggtagaagaaaatgttgcacttagagctttggagcttgcaagtgcaaaattacctgttagaacaagaatagtgagacgttatgaatgatttaaaattattaagaagtaagttatctactgaaacaatagaagagctttataaaaaccttaatcttttaaaaaaagaattgtttaatttaagatttcaacaagctttaggtgatttaaaaaatactagtaggttttcgttagtcaaaaagtctatagcacgtattaaaactgaattaacaaaaagagctaatagtgaggaatattaaaatgccgaaaagagtgttacaaggcgtggttataagttcaaaagctgataagacggttacagtaaaagtagaaagaaagtttaagcatcctatttataaaaaatttgtgaaagtatctaaaaaatatgctgctcatgattcagaaaataaatatcaagaaggagataaagttagtataattgaaagtcggcctatctcaaaaaccaaaacatgggtagtggtaaatggggaataaagttttttacttaattaacggcactcctcagccaagtcaaaagcctccggtcggaggcttttgactacatgcccatggcgtttacgccccgccctgccactcatcgcagtactgttgtaattcattaagcattctgccgacatggaagccatcacaaacggcatgatgaacctgaatcgccagcggcatcagcaccttgtcgccttgcgtataatatttgcccatagtgaaaacgggggcgaagaagttgtccatattggccacgtttaaatcaaaactggtgaaactcacccagggattggctgagacgaaaaacatattctcaataaaccctttagggaaataggccaggttttcaccgtaacacgccacatcttgcgaatatatgtgtagaaactgccggaaatcgtcgtggtattcactccagagcgatgaaaacgtttcagtttgctcatggaaaacggtgtaacaagggtgaacactatcccatatcaccagctcaccgtctttcattgccatacggaactccggatgagcattcatcaggcgggcaagaatgtgaataaaggccggataaaacttgtgcttatttttctttacggtctttaaaaaggccgtaatatccagctgaacggtctggttataggtacattgagcaactgactgaaatgcctcaaaatgttctttacgatgccattgggatatatcaacggtggtatatccagtgatttttttctccattttagcttccttagctcctgaaaatctcgataactcaaaaaatacgcccggtagtgatcttatttcattatggtgaaagttggaacctcttacgtgccaggccaaataggccgt

SEQ ID NO: 201 - DNA, 8002 bp, Artificial
  Synthetic
tcagatccttccgtatttagccagtatgttctctagtgtggttcgttgtttttgcgtgagccatgagaacgaaccattgagatcatgcttactttgcatgtcactcaaaaattttgcctcaaaactggtgagctgaatttttgcagttaaagcatcgtgtagtgtttttcttagtccgttacgtaggtaggaatctgatgtaatggttgttggtattttgtcaccattcatttttatctggttgttctcaagttcggttacgagatccatttgtctatctagttcaacttggaaaatcaacgtatcagtcgggcggcctcgcttatcaaccaccaatttcatattgctgtaagtgtttaaatctttacttattggtttcaaaacccattggttaagccttttaaactcatggtagttattttcaagcattaacatgaacttaaattcatcaaggctaatctctatatttgccttgtgagttttcttttgtgttagttcttttaataaccactcataaatcctcatagagtatttgttttcaaaagacttaacatgttccagattatattttatgaatttttttaactggaaaagataaggcaatatctcttcactaaaaactaattctaatttttcgcttgagaacttggcatagtttgtccactggaaaatcttaaagcctttaaccaaaggattcctgatttccacagttctcgtcatcagctctctggttgctttagctaatacaccataagcattttccctactgatgttcatcatctgagcgtattggttataagtgaacgataccgtccgttctttccttgtagggttttcaatcgtggggttgagtagtgccacacagcataaaattagcttggtttcatgctccgttaagtcatagcgactaatcgctagttcatttgctttgaaaacaactaattcagacatacatctcaattggtctaggtgattttaatcactataccaattgagatgggctagtcaatgataattactagtccttttcctttgagttgtgggtatctgtaaattctgctagacctttgctggaaaacttgtaaattctgctagaccctctgtaaattccgctagacctttgtgtgttttttttgtttatattcaagtggttataatttatagaataaagaaagaataaaaaaagataaaaagaatagatcccagccctgtgtataactcactactttagtcagttccgcagtattacaaaaggatgtcgcaaacgctgtttgctcctctacaaaacagaccttaaaaccctaaaggcttaagtagcaccctcgcaagctcgggcaaatcgctgaatattccttttgtctccgaccatcaggcacctgagtcgctgtctttttcgtgacattcagttcgctgcgctcacggctctggcagtgaatgggggtaaatggcactacaggcgccttttatggattcatgcaaggaaactacccataatacaagaaaagcccgtcacgggcttctcagggcgttttatggcgggtctgctatgtggtgctatctgactttttgctgttcagcagttcctgccctctgattttccagtctgaccacttcggattatcccgtgacaggtcattcagactggctaatgcacccagtaaggcagcggtatcatcaacaggcttacccgtcttactgtcaagaggacatccggtcaaataaaacgaaaggctcagtcgaaagactgggcctttcgttttgctgaggagacttagggaccctttatgacaacttgacggctacatcattcactttttcttcacaaccggcacggaactcgctcgggctggccccggtgcattttttaaatacccgcgagaaatagagttgatcgtcaaaaccaacattgcgaccgacggtggcgataggcatccgggtggtgctcaaaagcagcttcgcctggctgatacgttggtcctcgcgccagcttaagacgctaatccctaactgctggcggaaaagatgtgacagacgcgacggcgacaagcaaacatgctgtgcgacgctggcgatatcaaaattgctgtctgccaggtgatcgctgatgtactgacaagcctcgcgtacccgattatccatcggtggatggagcgactcgttaatcgcttccatgcgccgcagtaacaattgctcaagcagatttatcgccagcagctccgaatagcgcccttccccttgcccggcgttaatgatttgcccaaacaggtcgctgaaatgcggctggtgcgcttcatccgggcgaaagaaccccgtattggcaaatattgacggccagttaagccattcatgccagtaggcgcgcggacgaaagtaaacccactggtgataccattcgcgagcctccggatgacgaccgtagtgatgaatctctcctggcgggaacagcaaaatatcacccggtcggcaaacaaattctcgtccctgatttttcaccaccccctgaccgcgaatggtgagattgagaatataacctttcattcccagcggtcggtcgataaaaaaatcgagataaccgttggcctcaatcggcgttaaacccgccaccagatgggcattaaacgagtatcccggcagcaggggatcattttgcgcttcagccatacttttcatactcccaccattcagagaagaaaccaattgtccatattgcatcagacattgccgtcactgcgtcttttactggctcttctcgctaacccaaccggtaaccccgcttattaaaagcattctgtaacaaagcgggaccaaagccatgacaaaaacgcgtaacaaaagtgtctataatcacggcagaaaagtccacattgattatttgcacggcgtcacactttgctatgccatagcatttttatccataagattagcggatcctacctgacgctttttatcgcaactctctactgtttctccatacccgttttacctgcaggtgcagttaaaaaattggaagtagtttatgattcaaatgcagagcatcttggaagttgcagataattccggtgctaaaaaagttatgtgtattaaagttttaggtggctctcaccatatggtggcaaagctgggtgatgttatagttgtatctgttaaagacgctatacccggcggtaaggttaaaaagggtgatgtttataaaggcgtgattgttcgtacaaagactggagtagtaagacctgacggtagtacaataaaatttgatcaaaacgcattagtgcttttgaataaacaagatgaacctatcggtactagagtttttggtcctgttacaagagaacttagagcgaaaaaatatgttagaataatgtcgcttgcagaggaagtgttataaatgattaaattaaaagtaaaaaaaggtgatgaagttgttgttattaccggaaagcacaaaggaaaaaaaggtaaaatattaaaagttttcccggaggacagtaaagtaattgtttctggagtaaatgtagtaaaaaagcatactaaatctaatcaaatgagtgaaggcgggataataactaaagaattacctatacatatctcaaatattgcacacatcgatccaaaaaccggtaaccctaccaaggtagcttttaaattcttagaagacggttctaaggttagagtagcaaagaaatcaggggaaattattggtaaggaaggtaaataatgttaagatttaaagaattatatcagcaaaaaattattgaaaacttacaaaaaaaattttcttataaaaataaacacgaaataccgcaaattaagaaaattgtgataaatatgggagtaggggaagcaacagccgattccaaagtaattaataatgcagtaaatgatcttactttgatttccggtcagaagccggttgtaacgttagcaagaaaatctattgcaacttttaagttacgcgaaaatatgaaaataggttgcaaggttacattacgtaaagatagaatgtatgattttttagagaggttagtaattgttgcattaccccgtgttaaagaatttcgcggtttttcttataaaagttttgatggtaaagggaattttacttttgggttaaaagagcagatagtttttcctgaaattaattacgataaaatcgatacaataagaggtatggatattacaatcgttacatctgctaaaacagatcaagaaagtaaatttttgttatcagggtttaatttacctttttataattaatttttaggatatatataatggcaaaagtaagttctataaaaaagaacgaaagtaggaaaaaaaaatcacaaagtttacataataaacgtttagcactaaaaagtaaaatttatgataaaaatatttcattagaagagcgtttttctttggtaatgtcacttgcacaattacctagaaattcatcatctactagaataagaaatagatgtgagcttacaggtagaccaagaggtgttacaagaaagtttggtatatcgaggaataagcttagagaattaataggcagaggcttagttcccggtgtagttaagtcaagttggtaaaagtcgataggtaaatcatatgtcaatgacggataatgtagcagatatgttaactagaattagaaatgcttataaaagcaaattgataaatgtttcttttcctagttctaaaattaaaacttcaattttagatgttttgcaaaaagaaggttatataaaagattatataactactcaaaaaaataatattagttatactgaggtagctttaaaatactctgttaatggcgatgcttctatatgcgaaattcatagagtatcaaagcctggaaaaagagtatattctgctattaaagatttgaaaggatattataataatatgggtatatatattctttctactccttacggtgttatgtctgatagagaagctcatattaaaaatgtcggcggcgaagtaatttgtaaagtattttaaggtaaaaaatgtcacgtgttggaaaattgccaattactatacctgaaggtataaaaattggtttaaatgatttagaagtaaaaatatccggacctaaaggcgaattatcaaaaacttttaaaggtaatatagcaatttcattggcagaaaataagcttttagtaaaacctttagccgcaaataaaaatgcacgtgctatgtggggtactgcaagaagcataatatcaaatatggttaccggcgttaaagaaggttttaagcttaaactcgaaattaacggagtcggttacagggcgatggtaaaaggtaaatatttaaatttaatgcttgctaaaagccataatacaaaaattgaaataccttcagatattaaaatagagatgcctaagcaaaatattattattcttgagggaacagataaagaaaaattaggacaatttgcttcaattattataaaacagagaccacctgagccttataaaggaaaaggaattaaatttgaaaatcaatttataccgcgtaaagaaggtaagaaaaattaaatttaagagttaaatatgcgtagtgctaagctaaaatttgaaaaaagaagaagtagaataagacataaaatatctaaaacatctaatagagttagattatcaatatttaagtcaggtagacatatatatgcacaaattattgatgattctaagtctataacgattgctgctgcttcaactttagatgagaaaataaaaaaattaaaaaaatctcattgtaatattgaaaatgctatcaaagtaggcgaagaaatagcaaaaaaagctgattctgcagggataaaagacgtagtgtttgatagaggcggatataagtatcacggtgttgtaaaagcgctagctgatgcagctagagagaaaataaaattttaggttataaggttgtagtaatgtctaaagttaaaaaaaatgacgagactttaagtgaagttttagttgatgtaaatagagttacaaaagtagtaaaaggcggtagaagctttgctttttctgcttatgtagtggtcggtgataaagccggcagagtcggagcgggacacggaaaagctaaagaagtaaatgaagctcgaggaaaggcaaaacaagccgctaaaaagagaatgatgaaagtaccgttatatcaaaataggactattcaccatgacgttgtcggtaaaagtggagctgctaaagtgattttaagaagagctaaagcaggtacaggcattatagccggaggatctatgagagcaatttttgactctttaggcgttcatgatattgttgctaaatcaataggttcaacgaatgtttacgcaatgatttctgcaacatttgatgcattaaataaacttgcatcaccaaaatctattgctatgagaagagataaaaaagtaaatgaaatatctgtaaaatctgctgacattcaagttaatgaataatgttgtataagtaaggtgaagttatgaataataagatcaataatataaaaattactcaagttcacagtgctataggtcgtaagtatgatcaaaggttgatattagttgggcttggtttaaacaaaattaataagagcgttattcttgcaaatactaattcaatcaaagggatggttaacaaagtaaagcatttgttaaaaatagaaaatatgtaattagagtttttaaatgaaattaaatgaattatataataatataggtgctaaaaaaaataagaaaagaatagcacgcggtattggtagtggtaaaggaaaaaccggaggtagaggaattaaaggtcaaaaatctagatccggcgttgcaataaaaggttttgaaggtggtcaaacacctattatcaaaagactacctaaaagagggtttaattgtatttcaactaaaaaatacaatataataaatatttataatattgaagaagcattagccgatgggcgtttaagtgctggtgataatattacgaaagaaaaattggtagaagccagagtagttaataataaaaataataagaaattagtgaaattattatctatttgtagtgatgatttcgctgctcctctatcattaaaattagatgcttattcttctaaagctaaggatttaatcgagaaagcaggtggaaaattattatagtatatgggacttaattaacggcactcctcagccaagtcaaaagcctccggtcggaggcttttgactacatgcccatggcgtttacgccccgccctgccactcatcgcagtactgttgtaattcattaagcattctgccgacatggaagccatcacaaacggcatgatgaacctgaatcgccagcggcatcagcaccttgtcgccttgcgtataatatttgcccatagtgaaaacgggggcgaagaagttgtccatattggccacgtttaaatcaaaactggtgaaactcacccagggattggctgagacgaaaaacatattctcaataaaccctttagggaaataggccaggttttcaccgtaacacgccacatcttgcgaatatatgtgtagaaactgccggaaatcgtcgtggtattcactccagagcgatgaaaacgtttcagtttgctcatggaaaacggtgtaacaagggtgaacactatcccatatcaccagctcaccgtctttcattgccatacggaactccggatgagcattcatcaggcgggcaagaatgtgaataaaggccggataaaacttgtgcttatttttctttacggtctttaaaaaggccgtaatatccagctgaacggtctggttataggtacattgagcaactgactgaaatgcctcaaaatgttctttacgatgccattgggatatatcaacggtggtatatccagtgatttttttctccattttagcttccttagctcctgaaaatctcgataactcaaaaaatacgcccggtagtgatcttatttcattatggtgaaagttggaacctcttacgtgccaggccaaataggccgt

SEQ ID NO: 202 - DNA, 6416 bp, Artificial
  Synthetic
tcagatccttccgtatttagccagtatgttctctagtgtggttcgttgtttttgcgtgagccatgagaacgaaccattgagatcatgcttactttgcatgtcactcaaaaattttgcctcaaaactggtgagctgaatttttgcagttaaagcatcgtgtagtgtttttcttagtccgttacgtaggtaggaatctgatgtaatggttgttggtattttgtcaccattcatttttatctggttgttctcaagttcggttacgagatccatttgtctatctagttcaacttggaaaatcaacgtatcagtcgggcggcctcgcttatcaaccaccaatttcatattgctgtaagtgtttaaatctttacttattggtttcaaaacccattggttaagccttttaaactcatggtagttattttcaagcattaacatgaacttaaattcatcaaggctaatctctatatttgccttgtgagttttcttttgtgttagttcttttaataaccactcataaatcctcatagagtatttgttttcaaaagacttaacatgttccagattatattttatgaatttttttaactggaaaagataaggcaatatctcttcactaaaaactaattctaatttttcgcttgagaacttggcatagtttgtccactggaaaatcttaaagcctttaaccaaaggattcctgatttccacagttctcgtcatcagctctctggttgctttagctaatacaccataagcattttccctactgatgttcatcatctgagcgtattggttataagtgaacgataccgtccgttctttccttgtagggttttcaatcgtggggttgagtagtgccacacagcataaaattagcttggtttcatgctccgttaagtcatagcgactaatcgctagttcatttgctttgaaaacaactaattcagacatacatctcaattggtctaggtgattttaatcactataccaattgagatgggctagtcaatgataattactagtccttttcctttgagttgtgggtatctgtaaattctgctagacctttgctggaaaacttgtaaattctgctagaccctctgtaaattccgctagacctttgtgtgttttttttgtttatattcaagtggttataatttatagaataaagaaagaataaaaaaagataaaaagaatagatcccagccctgtgtataactcactactttagtcagttccgcagtattacaaaaggatgtcgcaaacgctgtttgctcctctacaaaacagaccttaaaaccctaaaggcttaagtagcaccctcgcaagctcgggcaaatcgctgaatattccttttgtctccgaccatcaggcacctgagtcgctgtctttttcgtgacattcagttcgctgcgctcacggctctggcagtgaatgggggtaaatggcactacaggcgccttttatggattcatgcaaggaaactacccataatacaagaaaagcccgtcacgggcttctcagggcgttttatggcgggtctgctatgtggtgctatctgactttttgctgttcagcagttcctgccctctgattttccagtctgaccacttcggattatcccgtgacaggtcattcagactggctaatgcacccagtaaggcagcggtatcatcaacaggcttacccgtcttactgtcaagaggacatccggtcaaataaaacgaaaggctcagtcgaaagactgggcctttcgttttgctgaggagacttagggaccctttatgacaacttgacggctacatcattcactttttcttcacaaccggcacggaactcgctcgggctggccccggtgcattttttaaatacccgcgagaaatagagttgatcgtcaaaaccaacattgcgaccgacggtggcgataggcatccgggtggtgctcaaaagcagcttcgcctggctgatacgttggtcctcgcgccagcttaagacgctaatccctaactgctggcggaaaagatgtgacagacgcgacggcgacaagcaaacatgctgtgcgacgctggcgatatcaaaattgctgtctgccaggtgatcgctgatgtactgacaagcctcgcgtacccgattatccatcggtggatggagcgactcgttaatcgcttccatgcgccgcagtaacaattgctcaagcagatttatcgccagcagctccgaatagcgcccttccccttgcccggcgttaatgatttgcccaaacaggtcgctgaaatgcggctggtgcgcttcatccgggcgaaagaaccccgtattggcaaatattgacggccagttaagccattcatgccagtaggcgcgcggacgaaagtaaacccactggtgataccattcgcgagcctccggatgacgaccgtagtgatgaatctctcctggcgggaacagcaaaatatcacccggtcggcaaacaaattctcgtccctgatttttcaccaccccctgaccgcgaatggtgagattgagaatataacctttcattcccagcggtcggtcgataaaaaaatcgagataaccgttggcctcaatcggcgttaaacccgccaccagatgggcattaaacgagtatcccggcagcaggggatcattttgcgcttcagccatacttttcatactcccaccattcagagaagaaaccaattgtccatattgcatcagacattgccgtcactgcgtcttttactggctcttctcgctaacccaaccggtaaccccgcttattaaaagcattctgtaacaaagcgggaccaaagccatgacaaaaacgcgtaacaaaagtgtctataatcacggcagaaaagtccacattgattatttgcacggcgtcacactttgctatgccatagcatttttatccataagattagcggatcctacctgacgctttttatcgcaactctctactgtttctccatacccgttttacctgcaggtgcagttaaaattttggagattatttgtggcaagaattgcaagtgttaatattcctgataataaacgtttagttgtgagtttaacttacatttacggtcttgggcctactatggcagcagagatctgtaataaagcaaaaatatcgaaagataaaaaagtgaaagaactgacagatcaagagttaataggcttacgtaatattattgaaagtgagtataaagttgagggtgatttaagacgagaagttacgcttaatattaagaaaaagaaagatataaggtgttatcaaggacttagacatatacgtaagttgccggtgagaggacagaacacgcattctaatgctcgaactagaaaaggtaaagctattgcgatagccggaaagaaaaaagctgtaaaataatagtttaagtatagagtataaataatgaatcagacggttaaagttaagaaaaagaaaaaaactatcactcttggtgttgtacatatccgagcatcatttaataatactatagtaacatttactgatatccaaggtaatactattgcttctgcatcggcaggaggtaatgggtttaaaggggcaagaaaagcaacaccttatgcagctcaagtaacaattgatagagcatcggaaaaagcaaaagaatatggtctaaaaactatttctattaggattggaggaccgggggctcagcgtgaatcagcaatgagagctttattcggacaaaattttgtggttacatcaattttagatgtatcgtcgattgctcataatggagtaagaccgccaaaaagaagaagagtataagagaatcataggtattaaatgttatcgttaagtaaaaattggaatactttaataaagccgaataaagttgcttatgaaaattttccagaaaccaataataaagctaaaattgtagttgaacctttagaaagaggttttggtttaacactcggtaatgctatgagaagagtattactttcttctttacaaggagcagctatcacgtctataaagatccctgctatagaacatgaattttcttctatacccggtgtaaaagaagatgtatctgaagtgattttaaacattaaaggtattgaagtaaaaatgcatgttgcagaaaaacgtatcatgaaattaaaagcaacaggaccttgtgttgtaacggccggtatgattgaaacaggtcatgatgtagaaatactgaatccggatcatgtaatttgtgatctagctaaggacaagcagcttgaaatggaattaacttgcaaggttggtaaaggatatgtacttagcacaaatagttatgaggataatttacctattggtgaaatagctatagatgctttatttaatccggtaaagagtgttacttataaggtagaaaatactagggtaggtcaggttaccgattatgataaattaattatgtttgtagaaactaacggtgatgtattacctgaaatggctgtaggtttagctgcacgtattttacaggagcaattacaattatttatttcttttgaagaacaggaagaagataagcaagttaaaactgatgctttaccattttcaccttatttacttaagagagttgatgaattggaattatcggttagatcggcaaactgtttgaaaaatgataatataatatatataggggatctagtaaaaagaacggaatccgatatgctaagaactccaaatttcggtagaaaatctttaaatgagattaaagaaatattggcaaaatttaatttaagattcggtatggatgtaccggattggccaccggaaaatattcaggaattatctaaacgttatgaagattcttataattaaggactaaaaaatgcgacataaaattaaaggcagaaagttaaatgtaacaagtagtcatcggcaagcaatgctcgctaatatggctatagcacttgtaacccatgaacaaattaaaactactttaccaaaagctaaggaattaagaccttatattgaaactctaattactaaagctaaaaaagctgatttaatggtaagaagaagcgttttatcaaaaataaaagataaaacagcagtagaaaagcttataaatattttaggtaccagatataaagatagacctggcggttatactagaataataaaagccggattccgttatggtgatttagcaccgatagcatatattgaatttgtagatagagatattaatgctaaaggaaatatacagcaagatgctaatgaagaaattaaaaattaaaatataagggactcggtgatggctaatcattcttcagcaaaaaaagctgttagacaaacagtaaaaagaactctaatcaataaaaaacgatctagtgcaataaagacttttataaagaaagttgtacatgaaatcagtcttggtaataaagaaaatgctaacatagctttatctgttgctcagtctaagataatgcaaggtgtgaaaaaaaatataattaaattaaataccgcctcaagaaaaatcagcagattatcaaggcaaataaaaagtttgaaagtaaataacactttatagtaatttaaacttaattaacggcactcctcagccaagtcaaaagcctccggtcggaggcttttgactacatgcccatggcgtttacgccccgccctgccactcatcgcagtactgttgtaattcattaagcattctgccgacatggaagccatcacaaacggcatgatgaacctgaatcgccagcggcatcagcaccttgtcgccttgcgtataatatttgcccatagtgaaaacgggggcgaagaagttgtccatattggccacgtttaaatcaaaactggtgaaactcacccagggattggctgagacgaaaaacatattctcaataaaccctttagggaaataggccaggttttcaccgtaacacgccacatcttgcgaatatatgtgtagaaactgccggaaatcgtcgtggtattcactccagagcgatgaaaacgtttcagtttgctcatggaaaacggtgtaacaagggtgaacactatcccatatcaccagctcaccgtctttcattgccatacggaactccggatgagcattcatcaggcgggcaagaatgtgaataaaggccggataaaacttgtgcttatttttctttacggtctttaaaaaggccgtaatatccagctgaacggtctggttataggtacattgagcaactgactgaaatgcctcaaaatgttctttacgatgccattgggatatatcaacggtggtatatccagtgatttttttctccattttagcttccttagctcctgaaaatctcgataactcaaaaaatacgcccggtagtgatcttatttcattatggtgaaagttggaacctcttacgtgccaggccaaataggccgt

SEQ ID NO: 203 - DNA, 6881 bp, Artificial
  Synthetic
tcagatccttccgtatttagccagtatgttctctagtgtggttcgttgtttttgcgtgagccatgagaacgaaccattgagatcatgcttactttgcatgtcactcaaaaattttgcctcaaaactggtgagctgaatttttgcagttaaagcatcgtgtagtgtttttcttagtccgttacgtaggtaggaatctgatgtaatggttgttggtattttgtcaccattcatttttatctggttgttctcaagttcggttacgagatccatttgtctatctagttcaacttggaaaatcaacgtatcagtcgggcggcctcgcttatcaaccaccaatttcatattgctgtaagtgtttaaatctttacttattggtttcaaaacccattggttaagccttttaaactcatggtagttattttcaagcattaacatgaacttaaattcatcaaggctaatctctatatttgccttgtgagttttcttttgtgttagttcttttaataaccactcataaatcctcatagagtatttgttttcaaaagacttaacatgttccagattatattttatgaatttttttaactggaaaagataaggcaatatctcttcactaaaaactaattctaatttttcgcttgagaacttggcatagtttgtccactggaaaatcttaaagcctttaaccaaaggattcctgatttccacagttctcgtcatcagctctctggttgctttagctaatacaccataagcattttccctactgatgttcatcatctgagcgtattggttataagtgaacgataccgtccgttctttccttgtagggttttcaatcgtggggttgagtagtgccacacagcataaaattagcttggtttcatgctccgttaagtcatagcgactaatcgctagttcatttgctttgaaaacaactaattcagacatacatctcaattggtctaggtgattttaatcactataccaattgagatgggctagtcaatgataattactagtccttttcctttgagttgtgggtatctgtaaattctgctagacctttgctggaaaacttgtaaattctgctagaccctctgtaaattccgctagacctttgtgtgttttttttgtttatattcaagtggttataatttatagaataaagaaagaataaaaaaagataaaaagaatagatcccagccctgtgtataactcactactttagtcagttccgcagtattacaaaaggatgtcgcaaacgctgtttgctcctctacaaaacagaccttaaaaccctaaaggcttaagtagcaccctcgcaagctcgggcaaatcgctgaatattccttttgtctccgaccatcaggcacctgagtcgctgtctttttcgtgacattcagttcgctgcgctcacggctctggcagtgaatgggggtaaatggcactacaggcgccttttatggattcatgcaaggaaactacccataatacaagaaaagcccgtcacgggcttctcagggcgttttatggcgggtctgctatgtggtgctatctgactttttgctgttcagcagttcctgccctctgattttccagtctgaccacttcggattatcccgtgacaggtcattcagactggctaatgcacccagtaaggcagcggtatcatcaacaggcttacccgtcttactgtcaagaggacatccggtcaaataaaacgaaaggctcagtcgaaagactgggcctttcgttttgctgaggagacttagggaccctttatgacaacttgacggctacatcattcactttttcttcacaaccggcacggaactcgctcgggctggccccggtgcattttttaaatacccgcgagaaatagagttgatcgtcaaaaccaacattgcgaccgacggtggcgataggcatccgggtggtgctcaaaagcagcttcgcctggctgatacgttggtcctcgcgccagcttaagacgctaatccctaactgctggcggaaaagatgtgacagacgcgacggcgacaagcaaacatgctgtgcgacgctggcgatatcaaaattgctgtctgccaggtgatcgctgatgtactgacaagcctcgcgtacccgattatccatcggtggatggagcgactcgttaatcgcttccatgcgccgcagtaacaattgctcaagcagatttatcgccagcagctccgaatagcgcccttccccttgcccggcgttaatgatttgcccaaacaggtcgctgaaatgcggctggtgcgcttcatccgggcgaaagaaccccgtattggcaaatattgacggccagttaagccattcatgccagtaggcgcgcggacgaaagtaaacccactggtgataccattcgcgagcctccggatgacgaccgtagtgatgaatctctcctggcgggaacagcaaaatatcacccggtcggcaaacaaattctcgtccctgatttttcaccaccccctgaccgcgaatggtgagattgagaatataacctttcattcccagcggtcggtcgataaaaaaatcgagataaccgttggcctcaatcggcgttaaacccgccaccagatgggcattaaacgagtatcccggcagcaggggatcattttgcgcttcagccatacttttcatactcccaccattcagagaagaaaccaattgtccatattgcatcagacattgccgtcactgcgtcttttactggctcttctcgctaacccaaccggtaaccccgcttattaaaagcattctgtaacaaagcgggaccaaagccatgacaaaaacgcgtaacaaaagtgtctataatcacggcagaaaagtccacattgattatttgcacggcgtcacactttgctatgccatagcatttttatccataagattagcggatcctacctgacgctttttatcgcaactctctactgtttctccatacccgttttacctgcaggtgcagttttttggagtattttttttaatgccgacatataatcaattagtacgttttgggagaaagtcaaaaactcgtaagaccaaatctcctgccttagaatctaatccttttaaaagcggtgtttgcctagttgtaaaaaccgttacccctaaaaagcctaactctgcacttcgtaagattgcaacggtgcgtttaagtaataaaagaaccgtaaatgcatatattcctggtgaaaagcatagtgtaaaggaacatgatagggtgttagtaagaggcggtcaggttcctgatcttccgggggtgaaatatcatatcgtactcggtgcttatgatattgccggagttaaaggacgtaagcaaggtcggtcacgttacggtgctcctcgtaaacaagttgcagttacaaaaaaataaattattagttagagagaaaaaataaaatgtcacgtcgtcatgccgcagagaagcgagtaattttacctgatatgaaatataacagtattttactgtcaagatttatcaataatattatgaaagaagggaagaaagcccttgcagagaaaattgtttattcagcctttaataaaattgaaaagaagcatagagttgatccgtatcaaacctttaataatgctatgcataacgtgaagccgcatttagaagtaacttcgattagggttggaggagctaattatcaagttccgacgcatgttgatgaaagaagaggatatgcccttgctagccgttggattattaatgctgcgtcaaaacgttctgaaaaaatgatgattgataaacttgccgaagagctgtttgaagcttctaataatagaggtgttgccattaagaagaaagaagatactcataaaatggccgaagctaataaagctttctctcattttagccctaaaaaaatgaaataaggtagggtataatgagtaaaataaataaacttgagcatattcgtaatatcggtatatgtgctcacattgatgccggtaaaaccacaactaccgaacgtattttatattataccggtaaatcgcataaaataggtgaagttcatgagggcggtgctaccatggattggatggaacaagaacaagaacgtggtataaccattacctcagctgctactacttgtagatggcaagataaaataattaatattatcgatactcctggacacgttgactttactatcgaagtagagcgttcgcttcgtgttcttgacggtgcggttgcagtatttgacggtgtagcaggtgttgaaccgcagtcagaaacggtttggaggcaagcagataaatataatgttcctagaatgtgttttgtcaataaaatggacagaatgggagcagatttttatagatgcgtggaaatgctcaaagatcgtttaggagcaaaaccgcttgttattcagttgcctgtagggattgaagaaaattttaaaggtatcattgatcttattaaaatgaaagcagtgatttggaaagatgaagcacttggagctgagtattttgaagaagatatacctgccgatatgaaagataaagctgaagaatatcgtgctaaattacttgatatggttgttgagttagatgatcatgttatggaaaaatatttatcaggtgaagaagtaacagcagaagaaattaaaagattaatcagaaaaggtactatttcagcagtattttatccggttttatgcggtagtgcttttaaaaataaaggggtacagcctttacttgatgccgtagtagatttcctaccttcgcctattgatataggtatagtaaaaggtatggaagtaagtaccggtgaagaaaaagatttccctatttcggtaactgagccttttgcagctttagcatttaaaattatgaatgacccatttgtcggttcattaacttttattagaatatattcaggtaaaattacttcaggaacaactgttattaataccgtaaagaataaaagagaaaaaatcggtagaatgctattaatgcatgctaataatcgtgaagacgtaaaagaagcatcagcaggtgatatagtagctttagcaggtcttaaagatactaccacaggtgatacgttatctgatattgatcagcaagtaatcttagaaagaatggaatttccagagccggtaattgagcttgcggtagaacctaaatcaacagccgatcaagaaaaaatgggcctcgcactttctcgtttagcagctgaagatccatcatttagagtgtcaactgattatgaaacaggacaaacagtgataaaaggaatgggagagctccatttagaaattatcattgatcgtatgagaagagagtttaaggtcgaagcaaatattggagctcctcaagtagcatatcgtgaaactataacaaaagtttgtgaaattgattatacccataagaaacaatccggcggtgcaggacaatttgctcgtgtaaaaattatttttgagcctctaaaagaggtaaaagatctaaaagatgaagataaaaataaaatttttgtctttgaaagtaaaatcatcggcggtgccgtgcctaaagaatatataccaggtgttgaaaaaggattaaataatattagagaaaccggtgttattgccggttatcctatgattgattttaaagcaactttagttgacggtgcgtttcatgatgtagattctagtgtacttgcgtttgaaattgctgcaaaggcagcatttagagaagggatgccgaaaggtaatcctaaattacttgagccgattatgcaagttgaagttatcactcctgatgaatatatgggtgatattataggtgatttaaatagtcgtagaggacaaattcaaagcatggatccaagagggaatgctcaagtagttactgcgaatgttcctttagcggaaatgtttggttatgttaatacgcttaggtctttatctcaaggtagagctcagtttagtatgatattctctcattatgatcaagtgccgagtcaagtagctgatattattaaagctaaaaaataatttaggggacttaattaacggcactcctcagccaagtcaaaagcctccggtcggaggcttttgactacatgcccatggcgtttacgccccgccctgccactcatcgcagtactgttgtaattcattaagcattctgccgacatggaagccatcacaaacggcatgatgaacctgaatcgccagcggcatcagcaccttgtcgccttgcgtataatatttgcccatagtgaaaacgggggcgaagaagttgtccatattggccacgtttaaatcaaaactggtgaaactcacccagggattggctgagacgaaaaacatattctcaataaaccctttagggaaataggccaggttttcaccgtaacacgccacatcttgcgaatatatgtgtagaaactgccggaaatcgtcgtggtattcactccagagcgatgaaaacgtttcagtttgctcatggaaaacggtgtaacaagggtgaacactatcccatatcaccagctcaccgtctttcattgccatacggaactccggatgagcattcatcaggcgggcaagaatgtgaataaaggccggataaaacttgtgcttatttttctttacggtctttaaaaaggccgtaatatccagctgaacggtctggttataggtacattgagcaactgactgaaatgcctcaaaatgttctttacgatgccattgggatatatcaacggtggtatatccagtgatttttttctccattttagcttccttagctcctgaaaatctcgataactcaaaaaatacgcccggtagtgatcttatttcattatggtgaaagttggaacctcttacgtgccaggccaaataggccgt

SEQ ID NO: 204 - DNA, 6226 bp, Artificial
  Synthetic
tcagatccttccgtatttagccagtatgttctctagtgtggttcgttgtttttgcgtgagccatgagaacgaaccattgagatcatgcttactttgcatgtcactcaaaaattttgcctcaaaactggtgagctgaatttttgcagttaaagcatcgtgtagtgtttttcttagtccgttacgtaggtaggaatctgatgtaatggttgttggtattttgtcaccattcatttttatctggttgttctcaagttcggttacgagatccatttgtctatctagttcaacttggaaaatcaacgtatcagtcgggcggcctcgcttatcaaccaccaatttcatattgctgtaagtgtttaaatctttacttattggtttcaaaacccattggttaagccttttaaactcatggtagttattttcaagcattaacatgaacttaaattcatcaaggctaatctctatatttgccttgtgagttttcttttgtgttagttcttttaataaccactcataaatcctcatagagtatttgttttcaaaagacttaacatgttccagattatattttatgaatttttttaactggaaaagataaggcaatatctcttcactaaaaactaattctaatttttcgcttgagaacttggcatagtttgtccactggaaaatcttaaagcctttaaccaaaggattcctgatttccacagttctcgtcatcagctctctggttgctttagctaatacaccataagcattttccctactgatgttcatcatctgagcgtattggttataagtgaacgataccgtccgttctttccttgtagggttttcaatcgtggggttgagtagtgccacacagcataaaattagcttggtttcatgctccgttaagtcatagcgactaatcgctagttcatttgctttgaaaacaactaattcagacatacatctcaattggtctaggtgattttaatcactataccaattgagatgggctagtcaatgataattactagtccttttcctttgagttgtgggtatctgtaaattctgctagacctttgctggaaaacttgtaaattctgctagaccctctgtaaattccgctagacctttgtgtgttttttttgtttatattcaagtggttataatttatagaataaagaaagaataaaaaaagataaaaagaatagatcccagccctgtgtataactcactactttagtcagttccgcagtattacaaaaggatgtcgcaaacgctgtttgctcctctacaaaacagaccttaaaaccctaaaggcttaagtagcaccctcgcaagctcgggcaaatcgctgaatattccttttgtctccgaccatcaggcacctgagtcgctgtctttttcgtgacattcagttcgctgcgctcacggctctggcagtgaatgggggtaaatggcactacaggcgccttttatggattcatgcaaggaaactacccataatacaagaaaagcccgtcacgggcttctcagggcgttttatggcgggtctgctatgtggtgctatctgactttttgctgttcagcagttcctgccctctgattttccagtctgaccacttcggattatcccgtgacaggtcattcagactggctaatgcacccagtaaggcagcggtatcatcaacaggcttacccgtcttactgtcaagaggacatccggtcaaataaaacgaaaggctcagtcgaaagactgggcctttcgttttgctgaggagacttagggaccctttatgacaacttgacggctacatcattcactttttcttcacaaccggcacggaactcgctcgggctggccccggtgcattttttaaatacccgcgagaaatagagttgatcgtcaaaaccaacattgcgaccgacggtggcgataggcatccgggtggtgctcaaaagcagcttcgcctggctgatacgttggtcctcgcgccagcttaagacgctaatccctaactgctggcggaaaagatgtgacagacgcgacggcgacaagcaaacatgctgtgcgacgctggcgatatcaaaattgctgtctgccaggtgatcgctgatgtactgacaagcctcgcgtacccgattatccatcggtggatggagcgactcgttaatcgcttccatgcgccgcagtaacaattgctcaagcagatttatcgccagcagctccgaatagcgcccttccccttgcccggcgttaatgatttgcccaaacaggtcgctgaaatgcggctggtgcgcttcatccgggcgaaagaaccccgtattggcaaatattgacggccagttaagccattcatgccagtaggcgcgcggacgaaagtaaacccactggtgataccattcgcgagcctccggatgacgaccgtagtgatgaatctctcctggcgggaacagcaaaatatcacccggtcggcaaacaaattctcgtccctgatttttcaccaccccctgaccgcgaatggtgagattgagaatataacctttcattcccagcggtcggtcgataaaaaaatcgagataaccgttggcctcaatcggcgttaaacccgccaccagatgggcattaaacgagtatcccggcagcaggggatcattttgcgcttcagccatacttttcatactcccaccattcagagaagaaaccaattgtccatattgcatcagacattgccgtcactgcgtcttttactggctcttctcgctaacccaaccggtaaccccgcttattaaaagcattctgtaacaaagcgggaccaaagccatgacaaaaacgcgtaacaaaagtgtctataatcacggcagaaaagtccacattgattatttgcacggcgtcacactttgctatgccatagcatttttatccataagattagcggatcctacctgacgctttttatcgcaactctctactgtttctccatacccgttttacctgcaggtgcagtaaaaataaggatatttataaatgtctcagaaagcaataaaaggttatattaacttgataattccagctgctggagccactcctgcacctcctataggaccggccctaggacaaagaaaagttaatattgcagcattttgtaaagattttaatgatgctacgcaaggtatggaaaaaggaatacctctgccaaccgtaattaccgtttatgaagatagtagcttttcttttaaaataaaaactcctcctgcttcttactttttaaagaaatatgctaaaattactaaaggttctagtgctactaaaaaagaagccgtagtaggtaaagttactatggatgattgtcgtgaaattgcaaagttaaaaatgcctgatttaaatacaaaaaatattgaagcagcaacaaaaattatttgtggtagtgctgcatctatgggacttgaagtagtagggaattaattattatgtcaaataagaaagatgttgctgtaaaaattagcggcggtaaaaaaataagagaagctagagaaaaagtaaaatcagatactttatataatttaacaaatgcagttgaacgattaaaatcagcatcatatgttaaatttgatccaaccttagaaatagttatgaagcttgcaattgattctaggcattccgatcaaatggtacgtggtgtagttaatttacctgccggtacaggcaaaaccgtaagagttgccgttatttgtaaagaagaaagagaagaagaagctaaaagtgccggagcagatttagtaggttcaacaaatattattgatgaaattaaagcagggaaaattaattttgatgtatgtatagctactcccgatatgatggtagctataggttcagttgcaagaattttaggaccaaaaggtttaatgcctaaccctaaacttggtaccgtaactttagatattaaaaatgctattaaaaatgctaaaagcggtcaggtagaatatagagcagagaaagcaggtataattcatgcagggcttggaaaattatctttttcagaccaagatttattaaaaaatttaaatgcgtttattgaggcagtaattaaagcaaaacctgccggattaaaaggaagttatttaaaagcaatgtatttatcttctactatgggagtatcggtacaaatagatttaactagtatagcataatttttatagccgtttaacggtagtatagtaataataaaaaatttttgttattttaagcatttgtatcagtttaaatatattaaactgtattataaaaggagaattaaaaggtgttaagatcagaaaaaccggtagcagtagaggatattgtaaatatttataaagaatcgccctctataattattactcattatcacgggttaaccgttagtcaagtgagttcgcttagagaatcacttaaatctaaagaagcaggttttaaagtagttaaaaatactttagcaaaaatagctgcaaatcaaacagggcttaatagtattgttaatttatttgcgggtcctactgctattgtttattctaaagaaccggttgagatggcaaaattagtagttaattttgctaaggctaatgataatcttaagattattggtggaatagtagataatcacgtattagatgaacattcaataaaagaactttctaagctacctacacttaatgagcttaggggtaaaattgttgggttattacaagcaccggctactaaggttgtaggtgttttacaagccccatcttcgagtatggcgagagtaatacaagcacatgctagtaaaaattaacttaaaggttactgcatcaggtattttaattgataattaaagagctgttatagtgaaaattaataaggttttttataggatattattcttattttaaaaaagtcttataatttgaaacacaaaagaatttaattaactttaaaatgcctgatgtagtaatctctcaatataaaaaaagtaaaaaggaaaaaattatggcagatttagctaaaattgaagaacaattatcatcattaacgttaatgcaagcagctgagcttgtgaaaatgctagaagaaaaatggggtgtatctgcagcagctcctgtagctgtagcagctgccggtgctgcagctcctgcagctgaagcagtagctgaaaaaactgagtttgaagtagttttaacagctgccggtgataagaaagttgaagtaattaaagttgtgaaagatatcacaggtcttggtttaattgaagctaagaagttagttgatgaagctccaaagccgattaaaagtaatgtgaaaaaagcagaagcagacgaaatcaaaggtaagttagaagctgctggagcaaaagttgaattaaaataattatttctacttaattaacggcactcctcagccaagtcaaaagcctccggtcggaggcttttgactacatgcccatggcgtttacgccccgccctgccactcatcgcagtactgttgtaattcattaagcattctgccgacatggaagccatcacaaacggcatgatgaacctgaatcgccagcggcatcagcaccttgtcgccttgcgtataatatttgcccatagtgaaaacgggggcgaagaagttgtccatattggccacgtttaaatcaaaactggtgaaactcacccagggattggctgagacgaaaaacatattctcaataaaccctttagggaaataggccaggttttcaccgtaacacgccacatcttgcgaatatatgtgtagaaactgccggaaatcgtcgtggtattcactccagagcgatgaaaacgtttcagtttgctcatggaaaacggtgtaacaagggtgaacactatcccatatcaccagctcaccgtctttcattgccatacggaactccggatgagcattcatcaggcgggcaagaatgtgaataaaggccggataaaacttgtgcttatttttctttacggtctttaaaaaggccgtaatatccagctgaacggtctggttataggtacattgagcaactgactgaaatgcctcaaaatgttctttacgatgccattgggatatatcaacggtggtatatccagtgatttttttctccattttagcttccttagctcctgaaaatctcgataactcaaaaaatacgcccggtagtgatcttatttcattatggtgaaagttggaacctcttacgtgccaggccaaataggccgt

SEQ ID NO: 205 - DNA, 7969 bp, Artificial
  Synthetic
tcagatccttccgtatttagccagtatgttctctagtgtggttcgttgtttttgcgtgagccatgagaacgaaccattgagatcatgcttactttgcatgtcactcaaaaattttgcctcaaaactggtgagctgaatttttgcagttaaagcatcgtgtagtgtttttcttagtccgttacgtaggtaggaatctgatgtaatggttgttggtattttgtcaccattcatttttatctggttgttctcaagttcggttacgagatccatttgtctatctagttcaacttggaaaatcaacgtatcagtcgggcggcctcgcttatcaaccaccaatttcatattgctgtaagtgtttaaatctttacttattggtttcaaaacccattggttaagccttttaaactcatggtagttattttcaagcattaacatgaacttaaattcatcaaggctaatctctatatttgccttgtgagttttcttttgtgttagttcttttaataaccactcataaatcctcatagagtatttgttttcaaaagacttaacatgttccagattatattttatgaatttttttaactggaaaagataaggcaatatctcttcactaaaaactaattctaatttttcgcttgagaacttggcatagtttgtccactggaaaatcttaaagcctttaaccaaaggattcctgatttccacagttctcgtcatcagctctctggttgctttagctaatacaccataagcattttccctactgatgttcatcatctgagcgtattggttataagtgaacgataccgtccgttctttccttgtagggttttcaatcgtggggttgagtagtgccacacagcataaaattagcttggtttcatgctccgttaagtcatagcgactaatcgctagttcatttgctttgaaaacaactaattcagacatacatctcaattggtctaggtgattttaatcactataccaattgagatgggctagtcaatgataattactagtccttttcctttgagttgtgggtatctgtaaattctgctagacctttgctggaaaacttgtaaattctgctagaccctctgtaaattccgctagacctttgtgtgttttttttgtttatattcaagtggttataatttatagaataaagaaagaataaaaaaagataaaaagaatagatcccagccctgtgtataactcactactttagtcagttccgcagtattacaaaaggatgtcgcaaacgctgtttgctcctctacaaaacagaccttaaaaccctaaaggcttaagtagcaccctcgcaagctcgggcaaatcgctgaatattccttttgtctccgaccatcaggcacctgagtcgctgtctttttcgtgacattcagttcgctgcgctcacggctctggcagtgaatgggggtaaatggcactacaggcgccttttatggattcatgcaaggaaactacccataatacaagaaaagcccgtcacgggcttctcagggcgttttatggcgggtctgctatgtggtgctatctgactttttgctgttcagcagttcctgccctctgattttccagtctgaccacttcggattatcccgtgacaggtcattcagactggctaatgcacccagtaaggcagcggtatcatcaacaggcttacccgtcttactgtcaagaggacatccggtcaaataaaacgaaaggctcagtcgaaagactgggcctttcgttttgctgaggagacttagggaccctttatgacaacttgacggctacatcattcactttttcttcacaaccggcacggaactcgctcgggctggccccggtgcattttttaaatacccgcgagaaatagagttgatcgtcaaaaccaacattgcgaccgacggtggcgataggcatccgggtggtgctcaaaagcagcttcgcctggctgatacgttggtcctcgcgccagcttaagacgctaatccctaactgctggcggaaaagatgtgacagacgcgacggcgacaagcaaacatgctgtgcgacgctggcgatatcaaaattgctgtctgccaggtgatcgctgatgtactgacaagcctcgcgtacccgattatccatcggtggatggagcgactcgttaatcgcttccatgcgccgcagtaacaattgctcaagcagatttatcgccagcagctccgaatagcgcccttccccttgcccggcgttaatgatttgcccaaacaggtcgctgaaatgcggctggtgcgcttcatccgggcgaaagaaccccgtattggcaaatattgacggccagttaagccattcatgccagtaggcgcgcggacgaaagtaaacccactggtgataccattcgcgagcctccggatgacgaccgtagtgatgaatctctcctggcgggaacagcaaaatatcacccggtcggcaaacaaattctcgtccctgatttttcaccaccccctgaccgcgaatggtgagattgagaatataacctttcattcccagcggtcggtcgataaaaaaatcgagataaccgttggcctcaatcggcgttaaacccgccaccagatgggcattaaacgagtatcccggcagcaggggatcattttgcgcttcagccatacttttcatactcccaccattcagagaagaaaccaattgtccatattgcatcagacattgccgtcactgcgtcttttactggctcttctcgctaacccaaccggtaaccccgcttattaaaagcattctgtaacaaagcgggaccaaagccatgacaaaaacgcgtaacaaaagtgtctataatcacggcagaaaagtccacattgattatttgcacggcgtcacactttgctatgccatagcatttttatccataagattagcggatcctacctgacgctttttatcgcaactctctactgtttctccatacccgttttacctgcaggtgcagtataagttaaggatattatcagtgacaaaaattgttcgttctaaatataaagctagtagaagacttggagtaagtctatggggtgatagcaaggatgctttcaatacacgaaattatcgtcccgggcaacatgggcagaataccatgattaaaacttcagattatggtttacatttaaaagctaagcaaagattgaaatgccactacggtcgtgtcactgaaaaacaatttagaaaaatttttgcacttgctcaaaaaatgaaaggtaataccggtgaaaatttcattgggttacttgaaagtagacttgatacggtagtttatagaatgaatatagctccaactatttttgctgcaagacagttagtttcacacggacatattaaattaaacggtaagaaagccgatatcgcaagcatacgactaaaggcaggcgatgttatagaagttaaagaatccgtaaaacaaataccgcttatccaagaatccgtttcaaaacaaggtcaaacaacaccggggtatttatcatttgatgtaccttcattaaccggtaaatatttaagagttcctgctctttctgatgtcccatatccttttgaagcagaagtgcatttagtaatcgagttatattctcgttaataattatatagagttaaggagttaaaaaatgaatattattgaccgttttgaacaggaaaatatttcaaagcgtactgcaaataaaaaaattcctgattttgaagccggcgatacagttaaggtaactgttaaaattattgatagatcgattgagaaagacggtaaggaaaaattaacggaaagatttcaagcttatgaaggtgtagttatcgcaaaaagaaatcgcggtattacttcatctttcttagtacgtaaaattagccacggtgaaggagtcgaaagacgctttatgacttactcgccgatagtacactctattgatgtagtaaaatacggagtagttcgtcgtgctaaactttattatttaagaaatagaagcggtaagtcggctagaattaaagagagacatatccatattgctaaaactaaggcagcaaaagcttaaatatattttaccaattataaggaacaatatgcctaaattaaaaacaaaatctgccgtaaaaaaacgttttaaacttactgctagcggcaaggttattgcatctcaagcaggtaaaaaacattttatgcgtcgtcgtactaaagctcaaattcgtaaccttagaggaactacaatactttgtcctcaagacggatataatattaaaaaatattttttaccgtacggtataaattaattaactaggagctaaagcaatgacacgtgcaaaatcaggaaaaatttccaaaaatcgacataaaaaaatccttaaattagccaaaggctatagaggtagagcaaatagctgttttagagtagctattgagaaagtagaaaaagccctccaatatgcttatagagatcgtagaaaccgtaaacgtgattttagaggcttatggattcaaagaataaatgcagcagtaagagaacatgggcttgtttactctcaatttatgggagctcttaaaaaaacagaaatcgatatagatcgtaaagtacttgcagaacttgccgtcaataacagtgacggattcgtaagtatcgtagaaaaagcaaaagcacatatttaagtatttaatgtcatctcgtggtcaagccacgggatgacatatttataataattaatttttattttcgttcggtataaatattatgaaacgtacatttcaacctagtaatttagttagaaaaagaagacatggttttagatctagaatggctactccaaccggaagagcaatcttaagaaaacgtcgtgctaaaggtagacataaattatctgcttaacataatcctttttaaagagatagttttcatgttcgcagttataaaagcaggtggaaaacaatataaagtagacagaaatagtattattaaagtcgaaaaaattgatggagaacttggctctaaaattcagtttgatcaaattttaatgattggcgaatactcaaagccttcttttattgggactccaatagttaaaggggctgtcgttacggctgaaattactaaccaacttaaagataataaaattatagtctttaagaaaaagcgtagaaaaaattatcgtcgtaaagccggtcatcgtcaagaattgacggaattaaaaatattagatattaccaaacaataataataacttaaaaggaattataaaatggcaaccaaaaaagccggtggtagttctagaaacggaagagactcggccggtcgaaggctgggagtcaaaaaagccgatggacaatatgtaatacccggtaatattatagttagacaacgcggcacaaaaattcatcctggaacgaatgtagggcttggcaaagatcatacaatatttgctttgatagaaggtagagtagaatttttaactaagcgaaatcataaaatcgtgaatgttaaagaaattgcaagtacttaagtattgtgtacgttaatatggagtaataatgagtgaaatattagaacttgaagcggagtcccgcacggaattcggtacgggagcagcaagagcattaagaagagcagggcgtgttccggctattatttatggagcgggtaaaacacctgttagtatttctttggaagaaaaggaaataactaaatattatagaaagccggcttttatctctcagttaattaatttaacaattgataagaaaaaatataaagtattgccgaaggctgtagaattacatcctgttacggatatagtacgccatgttgattttgtctttttagaagagaaaacccaaaaaatggaagtacctgtagtatatgaagggaaagaaagagctttaggcgttaaaagaggtggatactttaatatagtaaaaagaagagttactttattatgtgatgttaataatattccaagaaacgtaactatagatgttactaatatgcctatggctacttcgctaaaatcgtcaaaaatagaattaccgaaaggatgtagttttgttacaaaaaaagaatttgtccttgcaactattataggacgtagaggagcaaaaactgaagctgaaggggaacaacaagccgctgaagcagggaagtaagataattcagttttaaggtatttagcttatgtctcgtaagtgcgaactcacaggtgtgggtgttttatacggcaacaatgtatcacattctcagcgtaaaactagaagacgttttgaacctaacctaagatcggttaagtttacaagtgatataacagccggggaatatagattatcggttaatgctagatgtattagttcagtggaaaaagccgggggttttgatgcatatattctaaaagccgatgataatgttttatcaagtaacgctagagctattaagaaaaaaataattcagactaaaacagcaaaatcattatgaaaagcggtatacatccagaatataaaaagtttttgattaaagtaggaagcgatgtttttgaaacaatgtctactcatcctacaggtgaaattttaatggatgttgattttagaaagcatccggcatggaataaagattccggaaatgtagtaaatcaatcgaacaaaagtgttagtgattttaataaaagattctcaggtctttctttcggtagtaagaaagaagctagctaggctttgtttatatttagagaggctaataatggcagttccaaagaaaaaaacatcaaaatcaagacgtaatatgagacgttcgcacttagcacttggcaaagttaacgtaatagttgattcgcaaaccggtgaatataagcttccgcatcacgtttctttagtcgacggtacttataataatcgtctagtagtaacaaagaaaattaaaactgaagaagaagtagcctaaaagatttattaaatgtaaaagtatattttatgaaagttgttagctcattaaaatcgttaaaaaaacgtgataaagattgtcagatcgttaaaagaagaggcaaaatttttgtaataaataaaaagaataaaagatttaaagcaaaacaaggttaattaatcgtacttaattaacggcactcctcagccaagtcaaaagcctccggtcggaggcttttgactacatgcccatggcgtttacgccccgccctgccactcatcgcagtactgttgtaattcattaagcattctgccgacatggaagccatcacaaacggcatgatgaacctgaatcgccagcggcatcagcaccttgtcgccttgcgtataatatttgcccatagtgaaaacgggggcgaagaagttgtccatattggccacgtttaaatcaaaactggtgaaactcacccagggattggctgagacgaaaaacatattctcaataaaccctttagggaaataggccaggttttcaccgtaacacgccacatcttgcgaatatatgtgtagaaactgccggaaatcgtcgtggtattcactccagagcgatgaaaacgtttcagtttgctcatggaaaacggtgtaacaagggtgaacactatcccatatcaccagctcaccgtctttcattgccatacggaactccggatgagcattcatcaggcgggcaagaatgtgaataaaggccggataaaacttgtgcttatttttctttacggtctttaaaaaggccgtaatatccagctgaacggtctggttataggtacattgagcaactgactgaaatgcctcaaaatgttctttacgatgccattgggatatatcaacggtggtatatccagtgatttttttctccattttagcttccttagctcctgaaaatctcgataactcaaaaaatacgcccggtagtgatcttatttcattatggtgaaagttggaacctcttacgtgccaggccaaataggccgt

SEQ ID NO: 206 - DNA, 6152 bp, Artificial
  Synthetic
tcagatccttccgtatttagccagtatgttctctagtgtggttcgttgtttttgcgtgagccatgagaacgaaccattgagatcatgcttactttgcatgtcactcaaaaattttgcctcaaaactggtgagctgaatttttgcagttaaagcatcgtgtagtgtttttcttagtccgttacgtaggtaggaatctgatgtaatggttgttggtattttgtcaccattcatttttatctggttgttctcaagttcggttacgagatccatttgtctatctagttcaacttggaaaatcaacgtatcagtcgggcggcctcgcttatcaaccaccaatttcatattgctgtaagtgtttaaatctttacttattggtttcaaaacccattggttaagccttttaaactcatggtagttattttcaagcattaacatgaacttaaattcatcaaggctaatctctatatttgccttgtgagttttcttttgtgttagttcttttaataaccactcataaatcctcatagagtatttgttttcaaaagacttaacatgttccagattatattttatgaatttttttaactggaaaagataaggcaatatctcttcactaaaaactaattctaatttttcgcttgagaacttggcatagtttgtccactggaaaatcttaaagcctttaaccaaaggattcctgatttccacagttctcgtcatcagctctctggttgctttagctaatacaccataagcattttccctactgatgttcatcatctgagcgtattggttataagtgaacgataccgtccgttctttccttgtagggttttcaatcgtggggttgagtagtgccacacagcataaaattagcttggtttcatgctccgttaagtcatagcgactaatcgctagttcatttgctttgaaaacaactaattcagacatacatctcaattggtctaggtgattttaatcactataccaattgagatgggctagtcaatgataattactagtccttttcctttgagttgtgggtatctgtaaattctgctagacctttgctggaaaacttgtaaattctgctagaccctctgtaaattccgctagacctttgtgtgttttttttgtttatattcaagtggttataatttatagaataaagaaagaataaaaaaagataaaaagaatagatcccagccctgtgtataactcactactttagtcagttccgcagtattacaaaaggatgtcgcaaacgctgtttgctcctctacaaaacagaccttaaaaccctaaaggcttaagtagcaccctcgcaagctcgggcaaatcgctgaatattccttttgtctccgaccatcaggcacctgagtcgctgtctttttcgtgacattcagttcgctgcgctcacggctctggcagtgaatgggggtaaatggcactacaggcgccttttatggattcatgcaaggaaactacccataatacaagaaaagcccgtcacgggcttctcagggcgttttatggcgggtctgctatgtggtgctatctgactttttgctgttcagcagttcctgccctctgattttccagtctgaccacttcggattatcccgtgacaggtcattcagactggctaatgcacccagtaaggcagcggtatcatcaacaggcttacccgtcttactgtcaagaggacatccggtcaaataaaacgaaaggctcagtcgaaagactgggcctttcgttttgctgaggagacttagggaccctttatgacaacttgacggctacatcattcactttttcttcacaaccggcacggaactcgctcgggctggccccggtgcattttttaaatacccgcgagaaatagagttgatcgtcaaaaccaacattgcgaccgacggtggcgataggcatccgggtggtgctcaaaagcagcttcgcctggctgatacgttggtcctcgcgccagcttaagacgctaatccctaactgctggcggaaaagatgtgacagacgcgacggcgacaagcaaacatgctgtgcgacgctggcgatatcaaaattgctgtctgccaggtgatcgctgatgtactgacaagcctcgcgtacccgattatccatcggtggatggagcgactcgttaatcgcttccatgcgccgcagtaacaattgctcaagcagatttatcgccagcagctccgaatagcgcccttccccttgcccggcgttaatgatttgcccaaacaggtcgctgaaatgcggctggtgcgcttcatccgggcgaaagaaccccgtattggcaaatattgacggccagttaagccattcatgccagtaggcgcgcggacgaaagtaaacccactggtgataccattcgcgagcctccggatgacgaccgtagtgatgaatctctcctggcgggaacagcaaaatatcacccggtcggcaaacaaattctcgtccctgatttttcaccaccccctgaccgcgaatggtgagattgagaatataacctttcattcccagcggtcggtcgataaaaaaatcgagataaccgttggcctcaatcggcgttaaacccgccaccagatgggcattaaacgagtatcccggcagcaggggatcattttgcgcttcagccatacttttcatactcccaccattcagagaagaaaccaattgtccatattgcatcagacattgccgtcactgcgtcttttactggctcttctcgctaacccaaccggtaaccccgcttattaaaagcattctgtaacaaagcgggaccaaagccatgacaaaaacgcgtaacaaaagtgtctataatcacggcagaaaagtccacattgattatttgcacggcgtcacactttgctatgccatagcatttttatccataagattagcggatcctacctgacgctttttatcgcaactctctactgtttctccatacccgttttacctgcaggtgcagtgaggcagagcggagttaactatgtacgcggttttccaaagtggcggtaaacaacaccgtgtggccgaaggccaaaccgttcgtcttgaaaaaatcgaagtagccccaggcgaaacggttgaatttgacaaagttttaatggtaagcaacggtgacgacgtaaaaatcggcacaccaatcgttgctggtggtaaggtgactgctgaggttgttacacacggtcgtggcgataaagtaaaaatcgttaagttccgtcgtcgtaagcactctcgtaagcaagcgggtcaccgtcagtggttcacagaagtgaaaatcactggtatcaacgcataataggagcacgaacacatggcacacaaaaaagctggtggtagtaccaaaaacggtcgtgattcagaaagtaaacgcctaggtgttaagcgctttggtggtgaatctgttcttgctggtaacatcattgttcgtcaacgtggtactcgtttccacgctggtgacaacatgggtatcggtaaagaccacacgttgtttgcactaaaagacggtaaagttcagttcgacgttaaaggaccgaagaaccgtaaatttgtaagcatcgtagctgagtaagcgcgtaatatatttttggagacagacaatgtctgaagcaaatttcaaactagacgcttctgttcgtacagacctagggaaaggtgcgagccgccgcctacgtcgcgaagataagcttcctggtatcatctacggtggtgaagaagcaccagtttctatcacactagatcataacaaagtaaacaactctgctgactttgaagcgttttattctcacgttcttgagattaaccttgacggtaaagtcgttgaagttctagttaaagatatgcaacgtcacccgttcaagccaaagatcacacacattgacttccaacgtgtaatcgctggtcaagacgttcacactaacgtaccacttcacttcgtaaatgaagagaaatctgctgctgttaaagctggcggtattgctgagcaccacgtaactgaaatcgaagttacttgtctacctaagaaccttcctgagttcatcgaagtagacatggctggtgttgaaatgggtcaaacgctacacctttctgacctaactcttccagctggcgtttcttcagttgaacttgcgaagaacgacgaagctcacgacctagcggttgtaactgttaagcctgctcctaaagcggctgacgcagaagaagacggcgaagaagcagcttctgaggaataatcctgttgttgttctggagacaaatacaatgtcaagagtatgccaagtaacaggtaagcgtccaacggttggtaataaccgttcacacgcaagaaatgcgactcgtcgtcgctttttgccaaaccttcaaacacaccgtttttgggttgagagcgaaaaccgttttgtaaaactacgtttgtctgcaaaaggcatgcgtatcatcgacaagaaaggtattgattcagtactaactgacatccgtacccgtggtgagaaaatctaaggaagccgacaatgcgtgataaaattaaactagtttcttcagcaggtacaggtttcttctacactactgataaaaacaagcgtaacatgcctggcaaaatggagatcaaaaagtatgatcccgttgtgcgtaagcacgttatgttcaaagaggccaaaatcaagtaattagcttgttattatgtgaggtaacccaatgaaacaagatatccacccaaaatacgaagaaatcacagcaacttgctcatgtggtaacgtaatgaacattcgttctacgcttggtaaagacatcaacctagacgtatgttcttcatgtcacccattctacactggtaagcaacgtaacgttgacactggtggtcgtgttgatcgcttcaagaagcgtttcggtgcattgggcaaaaagtaagcctgataagcgagaccaggagtaagttatggcagtacaacaaaatcgtaaaacgcgttctaagcgcggtatgcgtcgctcacacgatgcattgacaggcgcgactttgtctgtcgattcaacgtcgggcgaaactcaccgtcgtcaccacgtgaccgctgacggttattacaaaggcaagaaagtaatcggcgcgtaatacggcgaatataagtgagactttggtcatgaaaagaacatttcaaccgagcaatctaaagcgcaagcgttctcacggttttcgtgctcgtatggcgactaaaaatggtcgtaaagtactagcagctcgccgtgcaaaaggccgcgctcgtctttcagcttaattgaaagaacttaattaacggcactcctcagccaagtcaaaagcctccggtcggaggcttttgactacatgcccatggcgtttacgccccgccctgccactcatcgcagtactgttgtaattcattaagcattctgccgacatggaagccatcacaaacggcatgatgaacctgaatcgccagcggcatcagcaccttgtcgccttgcgtataatatttgcccatagtgaaaacgggggcgaagaagttgtccatattggccacgtttaaatcaaaactggtgaaactcacccagggattggctgagacgaaaaacatattctcaataaaccctttagggaaataggccaggttttcaccgtaacacgccacatcttgcgaatatatgtgtagaaactgccggaaatcgtcgtggtattcactccagagcgatgaaaacgtttcagtttgctcatggaaaacggtgtaacaagggtgaacactatcccatatcaccagctcaccgtctttcattgccatacggaactccggatgagcattcatcaggcgggcaagaatgtgaataaaggccggataaaacttgtgcttatttttctttacggtctttaaaaaggccgtaatatccagctgaacggtctggttataggtacattgagcaactgactgaaatgcctcaaaatgttctttacgatgccattgggatatatcaacggtggtatatccagtgatttttttctccattttagcttccttagctcctgaaaatctcgataactcaaaaaatacgcccggtagtgatcttatttcattatggtgaaagttggaacctcttacgtgccaagccaaataggccgt

SEQ ID NO: 207 - DNA, 5825 bp, Artificial
  Synthetic
tcagatccttccgtatttagccagtatgttctctagtgtggttcgttgtttttgcgtgagccatgagaacgaaccattgagatcatgcttactttgcatgtcactcaaaaattttgcctcaaaactggtgagctgaatttttgcagttaaagcatcgtgtagtgtttttcttagtccgttacgtaggtaggaatctgatgtaatggttgttggtattttgtcaccattcatttttatctggttgttctcaagttcggttacgagatccatttgtctatctagttcaacttggaaaatcaacgtatcagtcgggcggcctcgcttatcaaccaccaatttcatattgctgtaagtgtttaaatctttacttattggtttcaaaacccattggttaagccttttaaactcatggtagttattttcaagcattaacatgaacttaaattcatcaaggctaatctctatatttgccttgtgagttttcttttgtgttagttcttttaataaccactcataaatcctcatagagtatttgttttcaaaagacttaacatgttccagattatattttatgaatttttttaactggaaaagataaggcaatatctcttcactaaaaactaattctaatttttcgcttgagaacttggcatagtttgtccactggaaaatcttaaagcctttaaccaaaggattcctgatttccacagttctcgtcatcagctctctggttgctttagctaatacaccataagcattttccctactgatgttcatcatctgagcgtattggttataagtgaacgataccgtccgttctttccttgtagggttttcaatcgtggggttgagtagtgccacacagcataaaattagcttggtttcatgctccgttaagtcatagcgactaatcgctagttcatttgctttgaaaacaactaattcagacatacatctcaattggtctaggtgattttaatcactataccaattgagatgggctagtcaatgataattactagtccttttcctttgagttgtgggtatctgtaaattctgctagacctttgctggaaaacttgtaaattctgctagaccctctgtaaattccgctagacctttgtgtgttttttttgtttatattcaagtggttataatttatagaataaagaaagaataaaaaaagataaaaagaatagatcccagccctgtgtataactcactactttagtcagttccgcagtattacaaaaggatgtcgcaaacgctgtttgctcctctacaaaacagaccttaaaaccctaaaggcttaagtagcaccctcgcaagctcgggcaaatcgctgaatattccttttgtctccgaccatcaggcacctgagtcgctgtctttttcgtgacattcagttcgctgcgctcacggctctggcagtgaatgggggtaaatggcactacaggcgccttttatggattcatgcaaggaaactacccataatacaagaaaagcccgtcacgggcttctcagggcgttttatggcgggtctgctatgtggtgctatctgactttttgctgttcagcagttcctgccctctgattttccagtctgaccacttcggattatcccgtgacaggtcattcagactggctaatgcacccagtaaggcagcggtatcatcaacaggcttacccgtcttactgtcaagaggacatccggtcaaataaaacgaaaggctcagtcgaaagactgggcctttcgttttgctgaggagacttagggaccctttatgacaacttgacggctacatcattcactttttcttcacaaccggcacggaactcgctcgggctggccccggtgcattttttaaatacccgcgagaaatagagttgatcgtcaaaaccaacattgcgaccgacggtggcgataggcatccgggtggtgctcaaaagcagcttcgcctggctgatacgttggtcctcgcgccagcttaagacgctaatccctaactgctggcggaaaagatgtgacagacgcgacggcgacaagcaaacatgctgtgcgacgctggcgatatcaaaattgctgtctgccaggtgatcgctgatgtactgacaagcctcgcgtacccgattatccatcggtggatggagcgactcgttaatcgcttccatgcgccgcagtaacaattgctcaagcagatttatcgccagcagctccgaatagcgcccttccccttgcccggcgttaatgatttgcccaaacaggtcgctgaaatgcggctggtgcgcttcatccgggcgaaagaaccccgtattggcaaatattgacggccagttaagccattcatgccagtaggcgcgcggacgaaagtaaacccactggtgataccattcgcgagcctccggatgacgaccgtagtgatgaatctctcctggcgggaacagcaaaatatcacccggtcggcaaacaaattctcgtccctgatttttcaccaccccctgaccgcgaatggtgagattgagaatataacctttcattcccagcggtcggtcgataaaaaaatcgagataaccgttggcctcaatcggcgttaaacccgccaccagatgggcattaaacgagtatcccggcagcaggggatcattttgcgcttcagccatacttttcatactcccaccattcagagaagaaaccaattgtccatattgcatcagacattgccgtcactgcgtcttttactggctcttctcgctaacccaaccggtaaccccgcttattaaaagcattctgtaacaaagcgggaccaaagccatgacaaaaacgcgtaacaaaagtgtctataatcacggcagaaaagtccacattgattatttgcacggcgtcacactttgctatgccatagcatttttatccataagattagcggatcctacctgacgctttttatcgcaactctctactgtttctccatacccgttttacctgcaggtgcagtcataataggagcacgaacacatggcacacaaaaaagctggtggtagtaccaaaaacggtcgtgattcagaaagtaaacgcctaggtgttaagcgctttggtggtgaatctgttcttgctggtaacatcattgttcgtcaacgtggtactcgtttccacgctggtgacaacatgggtatcggtaaagaccacacgttgtttgcactaaaagacggtaaagttcagttcgacgttaaaggaccgaagaaccgtaaatttgtaagcatcgtagctgagtaagcgcgtaatatatttttggagacagacaatgtctgaagcaaatttcaaactagacgcttctgttcgtacagacctagggaaaggtgcgagccgccgcctacgtcgcgaagataagcttcctggtatcatctacggtggtgaagaagcaccagtttctatcacactagatcataacaaagtaaacaactctgctgactttgaagcgttttattctcacgttcttgagattaaccttgacggtaaagtcgttgaagttctagttaaagatatgcaacgtcacccgttcaagccaaagatcacacacattgacttccaacgtgtaatcgctggtcaagacgttcacactaacgtaccacttcacttcgtaaatgaagagaaatctgctgctgttaaagctggcggtattgctgagcaccacgtaactgaaatcgaagttacttgtctacctaagaaccttcctgagttcatcgaagtagacatggctggtgttgaaatgggtcaaacgctacacctttctgacctaactcttccagctggcgtttcttcagttgaacttgcgaagaacgacgaagctcacgacctagcggttgtaactgttaagcctgctcctaaagcggctgacgcagaagaagacggcgaagaagcagcttctgaggaataatcctgttgttgttctggagacaaatacaatgtcaagagtatgccaagtaacaggtaagcgtccaacggttggtaataaccgttcacacgcaagaaatgcgactcgtcgtcgctttttgccaaaccttcaaacacaccgtttttgggttgagagcgaaaaccgttttgtaaaactacgtttgtctgcaaaaggcatgcgtatcatcgacaagaaaggtattgattcagtactaactgacatccgtacccgtggtgagaaaatctaaggaagccgacaatgcgtgataaaattaaactagtttcttcagcaggtacaggtttcttctacactactgataaaaacaagcgtaacatgcctggcaaaatggagatcaaaaagtatgatcccgttgtgcgtaagcacgttatgttcaaagaggccaaaatcaagtaattagcttgttattatgtgaggtaacccaatgaaacaagatatccacccaaaatacgaagaaatcacagcaacttgctcatgtggtaacgtaatgaacattcgttctacgcttggtaaagacatcaacctagacgtatgttcttcatgtcacccattctacactggtaagcaacgtaacgttgacactggtggtcgtgttgatcgcttcaagaagcgtttcggtgcattgggcaaaaagtaagcctgataagcgagaccaggagtaagttatggcagtacaacaaaatcgtaaaacgcgttctaagcgcggtatgcgtcgctcacacgatgcattgacaggcgcgactttgtctgtcgattcaacgtcgggcgaaactcaccgtcgtcaccacgtgaccgctgacggttattacaaaggcaagaaagtaatcggcgcgtaatacggcgaatataagtgagactttggtcatgaaaagaacatttcaaccgagcaatctaaagcgcaagcgttctcacggttttcgtgctcgtatggcgactaaaaatggtcgtaaagtactagcagctcgccgtgcaaaaggccgcgctcgtctttcagcttaattgaaagaacttaattaacggcactcctcagccaagtcaaaagcctccggtcggaggcttttgactacatgcccatggcgtttacgccccgccctgccactcatcgcagtactgttgtaattcattaagcattctgccgacatggaagccatcacaaacggcatgatgaacctgaatcgccagcggcatcagcaccttgtcgccttgcgtataatatttgcccatagtgaaaacgggggcgaagaagttgtccatattggccacgtttaaatcaaaactggtgaaactcacccagggattggctgagacgaaaaacatattctcaataaaccctttagggaaataggccaggttttcaccgtaacacgccacatcttgcgaatatatgtgtagaaactgccggaaatcgtcgtggtattcactccagagcgatgaaaacgtttcagtttgctcatggaaaacggtgtaacaagggtgaacactatcccatatcaccagctcaccgtctttcattgccatacggaactccggatgagcattcatcaggcgggcaagaatgtgaataaaggccggataaaacttgtgcttatttttctttacggtctttaaaaaggccgtaatatccagctgaacggtctggttataggtacattgagcaactgactgaaatgcctcaaaatgttctttacgatgccattgggatatatcaacggtggtatatccagtgatttttttctccattttagcttccttagctcctgaaaatctcgataactcaaaaaatacgcccggtagtgatcttatttcattatggtgaaagttggaacctcttacgtgccaagccaaataggccgt

SEQ ID NO: 208 - DNA, 5539 bp, Artificial
  Synthetic
tcagatccttccgtatttagccagtatgttctctagtgtggttcgttgtttttgcgtgagccatgagaacgaaccattgagatcatgcttactttgcatgtcactcaaaaattttgcctcaaaactggtgagctgaatttttgcagttaaagcatcgtgtagtgtttttcttagtccgttacgtaggtaggaatctgatgtaatggttgttggtattttgtcaccattcatttttatctggttgttctcaagttcggttacgagatccatttgtctatctagttcaacttggaaaatcaacgtatcagtcgggcggcctcgcttatcaaccaccaatttcatattgctgtaagtgtttaaatctttacttattggtttcaaaacccattggttaagccttttaaactcatggtagttattttcaagcattaacatgaacttaaattcatcaaggctaatctctatatttgccttgtgagttttcttttgtgttagttcttttaataaccactcataaatcctcatagagtatttgttttcaaaagacttaacatgttccagattatattttatgaatttttttaactggaaaagataaggcaatatctcttcactaaaaactaattctaatttttcgcttgagaacttggcatagtttgtccactggaaaatcttaaagcctttaaccaaaggattcctgatttccacagttctcgtcatcagctctctggttgctttagctaatacaccataagcattttccctactgatgttcatcatctgagcgtattggttataagtgaacgataccgtccgttctttccttgtagggttttcaatcgtggggttgagtagtgccacacagcataaaattagcttggtttcatgctccgttaagtcatagcgactaatcgctagttcatttgctttgaaaacaactaattcagacatacatctcaattggtctaggtgattttaatcactataccaattgagatgggctagtcaatgataattactagtccttttcctttgagttgtgggtatctgtaaattctgctagacctttgctggaaaacttgtaaattctgctagaccctctgtaaattccgctagacctttgtgtgttttttttgtttatattcaagtggttataatttatagaataaagaaagaataaaaaaagataaaaagaatagatcccagccctgtgtataactcactactttagtcagttccgcagtattacaaaaggatgtcgcaaacgctgtttgctcctctacaaaacagaccttaaaaccctaaaggcttaagtagcaccctcgcaagctcgggcaaatcgctgaatattccttttgtctccgaccatcaggcacctgagtcgctgtctttttcgtgacattcagttcgctgcgctcacggctctggcagtgaatgggggtaaatggcactacaggcgccttttatggattcatgcaaggaaactacccataatacaagaaaagcccgtcacgggcttctcagggcgttttatggcgggtctgctatgtggtgctatctgactttttgctgttcagcagttcctgccctctgattttccagtctgaccacttcggattatcccgtgacaggtcattcagactggctaatgcacccagtaaggcagcggtatcatcaacaggcttacccgtcttactgtcaagaggacatccggtcaaataaaacgaaaggctcagtcgaaagactgggcctttcgttttgctgaggagacttagggaccctttatgacaacttgacggctacatcattcactttttcttcacaaccggcacggaactcgctcgggctggccccggtgcattttttaaatacccgcgagaaatagagttgatcgtcaaaaccaacattgcgaccgacggtggcgataggcatccgggtggtgctcaaaagcagcttcgcctggctgatacgttggtcctcgcgccagcttaagacgctaatccctaactgctggcggaaaagatgtgacagacgcgacggcgacaagcaaacatgctgtgcgacgctggcgatatcaaaattgctgtctgccaggtgatcgctgatgtactgacaagcctcgcgtacccgattatccatcggtggatggagcgactcgttaatcgcttccatgcgccgcagtaacaattgctcaagcagatttatcgccagcagctccgaatagcgcccttccccttgcccggcgttaatgatttgcccaaacaggtcgctgaaatgcggctggtgcgcttcatccgggcgaaagaaccccgtattggcaaatattgacggccagttaagccattcatgccagtaggcgcgcggacgaaagtaaacccactggtgataccattcgcgagcctccggatgacgaccgtagtgatgaatctctcctggcgggaacagcaaaatatcacccggtcggcaaacaaattctcgtccctgatttttcaccaccccctgaccgcgaatggtgagattgagaatataacctttcattcccagcggtcggtcgataaaaaaatcgagataaccgttggcctcaatcggcgttaaacccgccaccagatgggcattaaacgagtatcccggcagcaggggatcattttgcgcttcagccatacttttcatactcccaccattcagagaagaaaccaattgtccatattgcatcagacattgccgtcactgcgtcttttactggctcttctcgctaacccaaccggtaaccccgcttattaaaagcattctgtaacaaagcgggaccaaagccatgacaaaaacgcgtaacaaaagtgtctataatcacggcagaaaagtccacattgattatttgcacggcgtcacactttgctatgccatagcatttttatccataagattagcggatcctacctgacgctttttatcgcaactctctactgtttctccatacccgttttacctgcaggtgcagttatatttttggagacagacaatgtctgaagcaaatttcaaactagacgcttctgttcgtacagacctagggaaaggtgcgagccgccgcctacgtcgcgaagataagcttcctggtatcatctacggtggtgaagaagcaccagtttctatcacactagatcataacaaagtaaacaactctgctgactttgaagcgttttattctcacgttcttgagattaaccttgacggtaaagtcgttgaagttctagttaaagatatgcaacgtcacccgttcaagccaaagatcacacacattgacttccaacgtgtaatcgctggtcaagacgttcacactaacgtaccacttcacttcgtaaatgaagagaaatctgctgctgttaaagctggcggtattgctgagcaccacgtaactgaaatcgaagttacttgtctacctaagaaccttcctgagttcatcgaagtagacatggctggtgttgaaatgggtcaaacgctacacctttctgacctaactcttccagctggcgtttcttcagttgaacttgcgaagaacgacgaagctcacgacctagcggttgtaactgttaagcctgctcctaaagcggctgacgcagaagaagacggcgaagaagcagcttctgaggaataatcctgttgttgttctggagacaaatacaatgtcaagagtatgccaagtaacaggtaagcgtccaacggttggtaataaccgttcacacgcaagaaatgcgactcgtcgtcgctttttgccaaaccttcaaacacaccgtttttgggttgagagcgaaaaccgttttgtaaaactacgtttgtctgcaaaaggcatgcgtatcatcgacaagaaaggtattgattcagtactaactgacatccgtacccgtggtgagaaaatctaaggaagccgacaatgcgtgataaaattaaactagtttcttcagcaggtacaggtttcttctacactactgataaaaacaagcgtaacatgcctggcaaaatggagatcaaaaagtatgatcccgttgtgcgtaagcacgttatgttcaaagaggccaaaatcaagtaattagcttgttattatgtgaggtaacccaatgaaacaagatatccacccaaaatacgaagaaatcacagcaacttgctcatgtggtaacgtaatgaacattcgttctacgcttggtaaagacatcaacctagacgtatgttcttcatgtcacccattctacactggtaagcaacgtaacgttgacactggtggtcgtgttgatcgcttcaagaagcgtttcggtgcattgggcaaaaagtaagcctgataagcgagaccaggagtaagttatggcagtacaacaaaatcgtaaaacgcgttctaagcgcggtatgcgtcgctcacacgatgcattgacaggcgcgactttgtctgtcgattcaacgtcgggcgaaactcaccgtcgtcaccacgtgaccgctgacggttattacaaaggcaagaaagtaatcggcgcgtaatacggcgaatataagtgagactttggtcatgaaaagaacatttcaaccgagcaatctaaagcgcaagcgttctcacggttttcgtgctcgtatggcgactaaaaatggtcgtaaagtactagcagctcgccgtgcaaaaggccgcgctcgtctttcagcttaattgaaagaacttaattaacggcactcctcagccaagtcaaaagcctccggtcggaggcttttgactacatgcccatggcgtttacgccccgccctgccactcatcgcagtactgttgtaattcattaagcattctgccgacatggaagccatcacaaacggcatgatgaacctgaatcgccagcggcatcagcaccttgtcgccttgcgtataatatttgcccatagtgaaaacgggggcgaagaagttgtccatattggccacgtttaaatcaaaactggtgaaactcacccagggattggctgagacgaaaaacatattctcaataaaccctttagggaaataggccaggttttcaccgtaacacgccacatcttgcgaatatatgtgtagaaactgccggaaatcgtcgtggtattcactccagagcgatgaaaacgtttcagtttgctcatggaaaacggtgtaacaagggtgaacactatcccatatcaccagctcaccgtctttcattgccatacggaactccggatgagcattcatcaggcgggcaagaatgtgaataaaggccggataaaacttgtgcttatttttctttacggtctttaaaaaggccgtaatatccagctgaacggtctggttataggtacattgagcaactgactgaaatgcctcaaaatgttctttacgatgccattgggatatatcaacggtggtatatccagtgatttttttctccattttagcttccttagctcctgaaaatctcgataactcaaaaaatacgcccggtagtgatcttatttcattatggtgaaagttggaacctcttacgtgccaagccaaataggccgt

SEQ ID NO: 209 - DNA, 4878 bp, Artificial
  Synthetic
tcagatccttccgtatttagccagtatgttctctagtgtggttcgttgtttttgcgtgagccatgagaacgaaccattgagatcatgcttactttgcatgtcactcaaaaattttgcctcaaaactggtgagctgaatttttgcagttaaagcatcgtgtagtgtttttcttagtccgttacgtaggtaggaatctgatgtaatggttgttggtattttgtcaccattcatttttatctggttgttctcaagttcggttacgagatccatttgtctatctagttcaacttggaaaatcaacgtatcagtcgggcggcctcgcttatcaaccaccaatttcatattgctgtaagtgtttaaatctttacttattggtttcaaaacccattggttaagccttttaaactcatggtagttattttcaagcattaacatgaacttaaattcatcaaggctaatctctatatttgccttgtgagttttcttttgtgttagttcttttaataaccactcataaatcctcatagagtatttgttttcaaaagacttaacatgttccagattatattttatgaatttttttaactggaaaagataaggcaatatctcttcactaaaaactaattctaatttttcgcttgagaacttggcatagtttgtccactggaaaatcttaaagcctttaaccaaaggattcctgatttccacagttctcgtcatcagctctctggttgctttagctaatacaccataagcattttccctactgatgttcatcatctgagcgtattggttataagtgaacgataccgtccgttctttccttgtagggttttcaatcgtggggttgagtagtgccacacagcataaaattagcttggtttcatgctccgttaagtcatagcgactaatcgctagttcatttgctttgaaaacaactaattcagacatacatctcaattggtctaggtgattttaatcactataccaattgagatgggctagtcaatgataattactagtccttttcctttgagttgtgggtatctgtaaattctgctagacctttgctggaaaacttgtaaattctgctagaccctctgtaaattccgctagacctttgtgtgttttttttgtttatattcaagtggttataatttatagaataaagaaagaataaaaaaagataaaaagaatagatcccagccctgtgtataactcactactttagtcagttccgcagtattacaaaaggatgtcgcaaacgctgtttgctcctctacaaaacagaccttaaaaccctaaaggcttaagtagcaccctcgcaagctcgggcaaatcgctgaatattccttttgtctccgaccatcaggcacctgagtcgctgtctttttcgtgacattcagttcgctgcgctcacggctctggcagtgaatgggggtaaatggcactacaggcgccttttatggattcatgcaaggaaactacccataatacaagaaaagcccgtcacgggcttctcagggcgttttatggcgggtctgctatgtggtgctatctgactttttgctgttcagcagttcctgccctctgattttccagtctgaccacttcggattatcccgtgacaggtcattcagactggctaatgcacccagtaaggcagcggtatcatcaacaggcttacccgtcttactgtcaagaggacatccggtcaaataaaacgaaaggctcagtcgaaagactgggcctttcgttttgctgaggagacttagggaccctttatgacaacttgacggctacatcattcactttttcttcacaaccggcacggaactcgctcgggctggccccggtgcattttttaaatacccgcgagaaatagagttgatcgtcaaaaccaacattgcgaccgacggtggcgataggcatccgggtggtgctcaaaagcagcttcgcctggctgatacgttggtcctcgcgccagcttaagacgctaatccctaactgctggcggaaaagatgtgacagacgcgacggcgacaagcaaacatgctgtgcgacgctggcgatatcaaaattgctgtctgccaggtgatcgctgatgtactgacaagcctcgcgtacccgattatccatcggtggatggagcgactcgttaatcgcttccatgcgccgcagtaacaattgctcaagcagatttatcgccagcagctccgaatagcgcccttccccttgcccggcgttaatgatttgcccaaacaggtcgctgaaatgcggctggtgcgcttcatccgggcgaaagaaccccgtattggcaaatattgacggccagttaagccattcatgccagtaggcgcgcggacgaaagtaaacccactggtgataccattcgcgagcctccggatgacgaccgtagtgatgaatctctcctggcgggaacagcaaaatatcacccggtcggcaaacaaattctcgtccctgatttttcaccaccccctgaccgcgaatggtgagattgagaatataacctttcattcccagcggtcggtcgataaaaaaatcgagataaccgttggcctcaatcggcgttaaacccgccaccagatgggcattaaacgagtatcccggcagcaggggatcattttgcgcttcagccatacttttcatactcccaccattcagagaagaaaccaattgtccatattgcatcagacattgccgtcactgcgtcttttactggctcttctcgctaacccaaccggtaaccccgcttattaaaagcattctgtaacaaagcgggaccaaagccatgacaaaaacgcgtaacaaaagtgtctataatcacggcagaaaagtccacattgattatttgcacggcgtcacactttgctatgccatagcatttttatccataagattagcggatcctacctgacgctttttatcgcaactctctactgtttctccatacccgttttacctgcaggtgcagtttgttctggagacaaatacaatgtcaagagtatgccaagtaacaggtaagcgtccaacggttggtaataaccgttcacacgcaagaaatgcgactcgtcgtcgctttttgccaaaccttcaaacacaccgtttttgggttgagagcgaaaaccgttttgtaaaactacgtttgtctgcaaaaggcatgcgtatcatcgacaagaaaggtattgattcagtactaactgacatccgtacccgtggtgagaaaatctaaggaagccgacaatgcgtgataaaattaaactagtttcttcagcaggtacaggtttcttctacactactgataaaaacaagcgtaacatgcctggcaaaatggagatcaaaaagtatgatcccgttgtgcgtaagcacgttatgttcaaagaggccaaaatcaagtaattagcttgttattatgtgaggtaacccaatgaaacaagatatccacccaaaatacgaagaaatcacagcaacttgctcatgtggtaacgtaatgaacattcgttctacgcttggtaaagacatcaacctagacgtatgttcttcatgtcacccattctacactggtaagcaacgtaacgttgacactggtggtcgtgttgatcgcttcaagaagcgtttcggtgcattgggcaaaaagtaagcctgataagcgagaccaggagtaagttatggcagtacaacaaaatcgtaaaacgcgttctaagcgcggtatgcgtcgctcacacgatgcattgacaggcgcgactttgtctgtcgattcaacgtcgggcgaaactcaccgtcgtcaccacgtgaccgctgacggttattacaaaggcaagaaagtaatcggcgcgtaatacggcgaatataagtgagactttggtcatgaaaagaacatttcaaccgagcaatctaaagcgcaagcgttctcacggttttcgtgctcgtatggcgactaaaaatggtcgtaaagtactagcagctcgccgtgcaaaaggccgcgctcgtctttcagcttaattgaaagaacttaattaacggcactcctcagccaagtcaaaagcctccggtcggaggcttttgactacatgcccatggcgtttacgccccgccctgccactcatcgcagtactgttgtaattcattaagcattctgccgacatggaagccatcacaaacggcatgatgaacctgaatcgccagcggcatcagcaccttgtcgccttgcgtataatatttgcccatagtgaaaacgggggcgaagaagttgtccatattggccacgtttaaatcaaaactggtgaaactcacccagggattggctgagacgaaaaacatattctcaataaaccctttagggaaataggccaggttttcaccgtaacacgccacatcttgcgaatatatgtgtagaaactgccggaaatcgtcgtggtattcactccagagcgatgaaaacgtttcagtttgctcatggaaaacggtgtaacaagggtgaacactatcccatatcaccagctcaccgtctttcattgccatacggaactccggatgagcattcatcaggcgggcaagaatgtgaataaaggccggataaaacttgtgcttatttttctttacggtctttaaaaaggccgtaatatccagctgaacggtctggttataggtacattgagcaactgactgaaatgcctcaaaatgttctttacgatgccattgggatatatcaacggtggtatatccagtgatttttttctccattttagcttccttagctcctgaaaatctcgataactcaaaaaatacgcccggtagtgatcttatttcattatggtgaaagttggaacctcttacgtgccaagccaaataggccgt

SEQ ID NO: 210 - DNA, 4630 bp, Artificial
  Synthetic
tcagatccttccgtatttagccagtatgttctctagtgtggttcgttgtttttgcgtgagccatgagaacgaaccattgagatcatgcttactttgcatgtcactcaaaaattttgcctcaaaactggtgagctgaatttttgcagttaaagcatcgtgtagtgtttttcttagtccgttacgtaggtaggaatctgatgtaatggttgttggtattttgtcaccattcatttttatctggttgttctcaagttcggttacgagatccatttgtctatctagttcaacttggaaaatcaacgtatcagtcgggcggcctcgcttatcaaccaccaatttcatattgctgtaagtgtttaaatctttacttattggtttcaaaacccattggttaagccttttaaactcatggtagttattttcaagcattaacatgaacttaaattcatcaaggctaatctctatatttgccttgtgagttttcttttgtgttagttcttttaataaccactcataaatcctcatagagtatttgttttcaaaagacttaacatgttccagattatattttatgaatttttttaactggaaaagataaggcaatatctcttcactaaaaactaattctaatttttcgcttgagaacttggcatagtttgtccactggaaaatcttaaagcctttaaccaaaggattcctgatttccacagttctcgtcatcagctctctggttgctttagctaatacaccataagcattttccctactgatgttcatcatctgagcgtattggttataagtgaacgataccgtccgttctttccttgtagggttttcaatcgtggggttgagtagtgccacacagcataaaattagcttggtttcatgctccgttaagtcatagcgactaatcgctagttcatttgctttgaaaacaactaattcagacatacatctcaattggtctaggtgattttaatcactataccaattgagatgggctagtcaatgataattactagtccttttcctttgagttgtgggtatctgtaaattctgctagacctttgctggaaaacttgtaaattctgctagaccctctgtaaattccgctagacctttgtgtgttttttttgtttatattcaagtggttataatttatagaataaagaaagaataaaaaaagataaaaagaatagatcccagccctgtgtataactcactactttagtcagttccgcagtattacaaaaggatgtcgcaaacgctgtttgctcctctacaaaacagaccttaaaaccctaaaggcttaagtagcaccctcgcaagctcgggcaaatcgctgaatattccttttgtctccgaccatcaggcacctgagtcgctgtctttttcgtgacattcagttcgctgcgctcacggctctggcagtgaatgggggtaaatggcactacaggcgccttttatggattcatgcaaggaaactacccataatacaagaaaagcccgtcacgggcttctcagggcgttttatggcgggtctgctatgtggtgctatctgactttttgctgttcagcagttcctgccctctgattttccagtctgaccacttcggattatcccgtgacaggtcattcagactggctaatgcacccagtaaggcagcggtatcatcaacaggcttacccgtcttactgtcaagaggacatccggtcaaataaaacgaaaggctcagtcgaaagactgggcctttcgttttgctgaggagacttagggaccctttatgacaacttgacggctacatcattcactttttcttcacaaccggcacggaactcgctcgggctggccccggtgcattttttaaatacccgcgagaaatagagttgatcgtcaaaaccaacattgcgaccgacggtggcgataggcatccgggtggtgctcaaaagcagcttcgcctggctgatacgttggtcctcgcgccagcttaagacgctaatccctaactgctggcggaaaagatgtgacagacgcgacggcgacaagcaaacatgctgtgcgacgctggcgatatcaaaattgctgtctgccaggtgatcgctgatgtactgacaagcctcgcgtacccgattatccatcggtggatggagcgactcgttaatcgcttccatgcgccgcagtaacaattgctcaagcagatttatcgccagcagctccgaatagcgcccttccccttgcccggcgttaatgatttgcccaaacaggtcgctgaaatgcggctggtgcgcttcatccgggcgaaagaaccccgtattggcaaatattgacggccagttaagccattcatgccagtaggcgcgcggacgaaagtaaacccactggtgataccattcgcgagcctccggatgacgaccgtagtgatgaatctctcctggcgggaacagcaaaatatcacccggtcggcaaacaaattctcgtccctgatttttcaccaccccctgaccgcgaatggtgagattgagaatataacctttcattcccagcggtcggtcgataaaaaaatcgagataaccgttggcctcaatcggcgttaaacccgccaccagatgggcattaaacgagtatcccggcagcaggggatcattttgcgcttcagccatacttttcatactcccaccattcagagaagaaaccaattgtccatattgcatcagacattgccgtcactgcgtcttttactggctcttctcgctaacccaaccggtaaccccgcttattaaaagcattctgtaacaaagcgggaccaaagccatgacaaaaacgcgtaacaaaagtgtctataatcacggcagaaaagtccacattgattatttgcacggcgtcacactttgctatgccatagcatttttatccataagattagcggatcctacctgacgctttttatcgcaactctctactgtttctccatacccgttttacctgcaggtgcagtaaaatctaaggaagccgacaatgcgtgataaaattaaactagtttcttcagcaggtacaggtttcttctacactactgataaaaacaagcgtaacatgcctggcaaaatggagatcaaaaagtatgatcccgttgtgcgtaagcacgttatgttcaaagaggccaaaatcaagtaattagcttgttattatgtgaggtaacccaatgaaacaagatatccacccaaaatacgaagaaatcacagcaacttgctcatgtggtaacgtaatgaacattcgttctacgcttggtaaagacatcaacctagacgtatgttcttcatgtcacccattctacactggtaagcaacgtaacgttgacactggtggtcgtgttgatcgcttcaagaagcgtttcggtgcattgggcaaaaagtaagcctgataagcgagaccaggagtaagttatggcagtacaacaaaatcgtaaaacgcgttctaagcgcggtatgcgtcgctcacacgatgcattgacaggcgcgactttgtctgtcgattcaacgtcgggcgaaactcaccgtcgtcaccacgtgaccgctgacggttattacaaaggcaagaaagtaatcggcgcgtaatacggcgaatataagtgagactttggtcatgaaaagaacatttcaaccgagcaatctaaagcgcaagcgttctcacggttttcgtgctcgtatggcgactaaaaatggtcgtaaagtactagcagctcgccgtgcaaaaggccgcgctcgtctttcagcttaattgaaagaacttaattaacggcactcctcagccaagtcaaaagcctccggtcggaggcttttgactacatgcccatggcgtttacgccccgccctgccactcatcgcagtactgttgtaattcattaagcattctgccgacatggaagccatcacaaacggcatgatgaacctgaatcgccagcggcatcagcaccttgtcgccttgcgtataatatttgcccatagtgaaaacgggggcgaagaagttgtccatattggccacgtttaaatcaaaactggtgaaactcacccagggattggctgagacgaaaaacatattctcaataaaccctttagggaaataggccaggttttcaccgtaacacgccacatcttgcgaatatatgtgtagaaactgccggaaatcgtcgtggtattcactccagagcgatgaaaacgtttcagtttgctcatggaaaacggtgtaacaagggtgaacactatcccatatcaccagctcaccgtctttcattgccatacggaactccggatgagcattcatcaggcgggcaagaatgtgaataaaggccggataaaacttgtgcttatttttctttacggtctttaaaaaggccgtaatatccagctgaacggtctggttataggtacattgagcaactgactgaaatgcctcaaaatgttctttacgatgccattgggatatatcaacggtggtatatccagtgatttttttctccattttagcttccttagctcctgaaaatctcgataactcaaaaaatacgcccggtagtgatcttatttcattatggtgaaagttggaacctcttacgtgccaagccaaataggccgt

SEQ ID NO: 211 - DNA, 4446 bp, Artificial
  Synthetic
tcagatccttccgtatttagccagtatgttctctagtgtggttcgttgtttttgcgtgagccatgagaacgaaccattgagatcatgcttactttgcatgtcactcaaaaattttgcctcaaaactggtgagctgaatttttgcagttaaagcatcgtgtagtgtttttcttagtccgttacgtaggtaggaatctgatgtaatggttgttggtattttgtcaccattcatttttatctggttgttctcaagttcggttacgagatccatttgtctatctagttcaacttggaaaatcaacgtatcagtcgggcggcctcgcttatcaaccaccaatttcatattgctgtaagtgtttaaatctttacttattggtttcaaaacccattggttaagccttttaaactcatggtagttattttcaagcattaacatgaacttaaattcatcaaggctaatctctatatttgccttgtgagttttcttttgtgttagttcttttaataaccactcataaatcctcatagagtatttgttttcaaaagacttaacatgttccagattatattttatgaatttttttaactggaaaagataaggcaatatctcttcactaaaaactaattctaatttttcgcttgagaacttggcatagtttgtccactggaaaatcttaaagcctttaaccaaaggattcctgatttccacagttctcgtcatcagctctctggttgctttagctaatacaccataagcattttccctactgatgttcatcatctgagcgtattggttataagtgaacgataccgtccgttctttccttgtagggttttcaatcgtggggttgagtagtgccacacagcataaaattagcttggtttcatgctccgttaagtcatagcgactaatcgctagttcatttgctttgaaaacaactaattcagacatacatctcaattggtctaggtgattttaatcactataccaattgagatgggctagtcaatgataattactagtccttttcctttgagttgtgggtatctgtaaattctgctagacctttgctggaaaacttgtaaattctgctagaccctctgtaaattccgctagacctttgtgtgttttttttgtttatattcaagtggttataatttatagaataaagaaagaataaaaaaagataaaaagaatagatcccagccctgtgtataactcactactttagtcagttccgcagtattacaaaaggatgtcgcaaacgctgtttgctcctctacaaaacagaccttaaaaccctaaaggcttaagtagcaccctcgcaagctcgggcaaatcgctgaatattccttttgtctccgaccatcaggcacctgagtcgctgtctttttcgtgacattcagttcgctgcgctcacggctctggcagtgaatgggggtaaatggcactacaggcgccttttatggattcatgcaaggaaactacccataatacaagaaaagcccgtcacgggcttctcagggcgttttatggcgggtctgctatgtggtgctatctgactttttgctgttcagcagttcctgccctctgattttccagtctgaccacttcggattatcccgtgacaggtcattcagactggctaatgcacccagtaaggcagcggtatcatcaacaggcttacccgtcttactgtcaagaggacatccggtcaaataaaacgaaaggctcagtcgaaagactgggcctttcgttttgctgaggagacttagggaccctttatgacaacttgacggctacatcattcactttttcttcacaaccggcacggaactcgctcgggctggccccggtgcattttttaaatacccgcgagaaatagagttgatcgtcaaaaccaacattgcgaccgacggtggcgataggcatccgggtggtgctcaaaagcagcttcgcctggctgatacgttggtcctcgcgccagcttaagacgctaatccctaactgctggcggaaaagatgtgacagacgcgacggcgacaagcaaacatgctgtgcgacgctggcgatatcaaaattgctgtctgccaggtgatcgctgatgtactgacaagcctcgcgtacccgattatccatcggtggatggagcgactcgttaatcgcttccatgcgccgcagtaacaattgctcaagcagatttatcgccagcagctccgaatagcgcccttccccttgcccggcgttaatgatttgcccaaacaggtcgctgaaatgcggctggtgcgcttcatccgggcgaaagaaccccgtattggcaaatattgacggccagttaagccattcatgccagtaggcgcgcggacgaaagtaaacccactggtgataccattcgcgagcctccggatgacgaccgtagtgatgaatctctcctggcgggaacagcaaaatatcacccggtcggcaaacaaattctcgtccctgatttttcaccaccccctgaccgcgaatggtgagattgagaatataacctttcattcccagcggtcggtcgataaaaaaatcgagataaccgttggcctcaatcggcgttaaacccgccaccagatgggcattaaacgagtatcccggcagcaggggatcattttgcgcttcagccatacttttcatactcccaccattcagagaagaaaccaattgtccatattgcatcagacattgccgtcactgcgtcttttactggctcttctcgctaacccaaccggtaaccccgcttattaaaagcattctgtaacaaagcgggaccaaagccatgacaaaaacgcgtaacaaaagtgtctataatcacggcagaaaagtccacattgattatttgcacggcgtcacactttgctatgccatagcatttttatccataagattagcggatcctacctgacgctttttatcgcaactctctactgtttctccatacccgttttacctgcaggtgcagtttattatgtgaggtaacccaatgaaacaagatatccacccaaaatacgaagaaatcacagcaacttgctcatgtggtaacgtaatgaacattcgttctacgcttggtaaagacatcaacctagacgtatgttcttcatgtcacccattctacactggtaagcaacgtaacgttgacactggtggtcgtgttgatcgcttcaagaagcgtttcggtgcattgggcaaaaagtaagcctgataagcgagaccaggagtaagttatggcagtacaacaaaatcgtaaaacgcgttctaagcgcggtatgcgtcgctcacacgatgcattgacaggcgcgactttgtctgtcgattcaacgtcgggcgaaactcaccgtcgtcaccacgtgaccgctgacggttattacaaaggcaagaaagtaatcggcgcgtaatacggcgaatataagtgagactttggtcatgaaaagaacatttcaaccgagcaatctaaagcgcaagcgttctcacggttttcgtgctcgtatggcgactaaaaatggtcgtaaagtactagcagctcgccgtgcaaaaggccgcgctcgtctttcagcttaattgaaagaacttaattaacggcactcctcagccaagtcaaaagcctccggtcggaggcttttgactacatgcccatggcgtttacgccccgccctgccactcatcgcagtactgttgtaattcattaagcattctgccgacatggaagccatcacaaacggcatgatgaacctgaatcgccagcggcatcagcaccttgtcgccttgcgtataatatttgcccatagtgaaaacgggggcgaagaagttgtccatattggccacgtttaaatcaaaactggtgaaactcacccagggattggctgagacgaaaaacatattctcaataaaccctttagggaaataggccaggttttcaccgtaacacgccacatcttgcgaatatatgtgtagaaactgccggaaatcgtcgtggtattcactccagagcgatgaaaacgtttcagtttgctcatggaaaacggtgtaacaagggtgaacactatcccatatcaccagctcaccgtctttcattgccatacggaactccggatgagcattcatcaggcgggcaagaatgtgaataaaggccggataaaacttgtgcttatttttctttacggtctttaaaaaggccgtaatatccagctgaacggtctggttataggtacattgagcaactgactgaaatgcctcaaaatgttctttacgatgccattgggatatatcaacggtggtatatccagtgatttttttctccattttagcttccttagctcctgaaaatctcgataactcaaaaaatacgcccggtagtgatcttatttcattatggtgaaagttggaacctcttacgtgccaagccaaataggccgt

SEQ ID NO: 212 - DNA, 4205 bp, Artificial
  Synthetic
tcagatccttccgtatttagccagtatgttctctagtgtggttcgttgtttttgcgtgagccatgagaacgaaccattgagatcatgcttactttgcatgtcactcaaaaattttgcctcaaaactggtgagctgaatttttgcagttaaagcatcgtgtagtgtttttcttagtccgttacgtaggtaggaatctgatgtaatggttgttggtattttgtcaccattcatttttatctggttgttctcaagttcggttacgagatccatttgtctatctagttcaacttggaaaatcaacgtatcagtcgggcggcctcgcttatcaaccaccaatttcatattgctgtaagtgtttaaatctttacttattggtttcaaaacccattggttaagccttttaaactcatggtagttattttcaagcattaacatgaacttaaattcatcaaggctaatctctatatttgccttgtgagttttcttttgtgttagttcttttaataaccactcataaatcctcatagagtatttgttttcaaaagacttaacatgttccagattatattttatgaatttttttaactggaaaagataaggcaatatctcttcactaaaaactaattctaatttttcgcttgagaacttggcatagtttgtccactggaaaatcttaaagcctttaaccaaaggattcctgatttccacagttctcgtcatcagctctctggttgctttagctaatacaccataagcattttccctactgatgttcatcatctgagcgtattggttataagtgaacgataccgtccgttctttccttgtagggttttcaatcgtggggttgagtagtgccacacagcataaaattagcttggtttcatgctccgttaagtcatagcgactaatcgctagttcatttgctttgaaaacaactaattcagacatacatctcaattggtctaggtgattttaatcactataccaattgagatgggctagtcaatgataattactagtccttttcctttgagttgtgggtatctgtaaattctgctagacctttgctggaaaacttgtaaattctgctagaccctctgtaaattccgctagacctttgtgtgttttttttgtttatattcaagtggttataatttatagaataaagaaagaataaaaaaagataaaaagaatagatcccagccctgtgtataactcactactttagtcagttccgcagtattacaaaaggatgtcgcaaacgctgtttgctcctctacaaaacagaccttaaaaccctaaaggcttaagtagcaccctcgcaagctcgggcaaatcgctgaatattccttttgtctccgaccatcaggcacctgagtcgctgtctttttcgtgacattcagttcgctgcgctcacggctctggcagtgaatgggggtaaatggcactacaggcgccttttatggattcatgcaaggaaactacccataatacaagaaaagcccgtcacgggcttctcagggcgttttatggcgggtctgctatgtggtgctatctgactttttgctgttcagcagttcctgccctctgattttccagtctgaccacttcggattatcccgtgacaggtcattcagactggctaatgcacccagtaaggcagcggtatcatcaacaggcttacccgtcttactgtcaagaggacatccggtcaaataaaacgaaaggctcagtcgaaagactgggcctttcgttttgctgaggagacttagggaccctttatgacaacttgacggctacatcattcactttttcttcacaaccggcacggaactcgctcgggctggccccggtgcattttttaaatacccgcgagaaatagagttgatcgtcaaaaccaacattgcgaccgacggtggcgataggcatccgggtggtgctcaaaagcagcttcgcctggctgatacgttggtcctcgcgccagcttaagacgctaatccctaactgctggcggaaaagatgtgacagacgcgacggcgacaagcaaacatgctgtgcgacgctggcgatatcaaaattgctgtctgccaggtgatcgctgatgtactgacaagcctcgcgtacccgattatccatcggtggatggagcgactcgttaatcgcttccatgcgccgcagtaacaattgctcaagcagatttatcgccagcagctccgaatagcgcccttccccttgcccggcgttaatgatttgcccaaacaggtcgctgaaatgcggctggtgcgcttcatccgggcgaaagaaccccgtattggcaaatattgacggccagttaagccattcatgccagtaggcgcgcggacgaaagtaaacccactggtgataccattcgcgagcctccggatgacgaccgtagtgatgaatctctcctggcgggaacagcaaaatatcacccggtcggcaaacaaattctcgtccctgatttttcaccaccccctgaccgcgaatggtgagattgagaatataacctttcattcccagcggtcggtcgataaaaaaatcgagataaccgttggcctcaatcggcgttaaacccgccaccagatgggcattaaacgagtatcccggcagcaggggatcattttgcgcttcagccatacttttcatactcccaccattcagagaagaaaccaattgtccatattgcatcagacattgccgtcactgcgtcttttactggctcttctcgctaacccaaccggtaaccccgcttattaaaagcattctgtaacaaagcgggaccaaagccatgacaaaaacgcgtaacaaaagtgtctataatcacggcagaaaagtccacattgattatttgcacggcgtcacactttgctatgccatagcatttttatccataagattagcggatcctacctgacgctttttatcgcaactctctactgtttctccatacccgttttacctgcaggtgcagtagcgagaccaggagtaagttatggcagtacaacaaaatcgtaaaacgcgttctaagcgcggtatgcgtcgctcacacgatgcattgacaggcgcgactttgtctgtcgattcaacgtcgggcgaaactcaccgtcgtcaccacgtgaccgctgacggttattacaaaggcaagaaagtaatcggcgcgtaatacggcgaatataagtgagactttggtcatgaaaagaacatttcaaccgagcaatctaaagcgcaagcgttctcacggttttcgtgctcgtatggcgactaaaaatggtcgtaaagtactagcagctcgccgtgcaaaaggccgcgctcgtctttcagcttaattgaaagaacttaattaacggcactcctcagccaagtcaaaagcctccggtcggaggcttttgactacatgcccatggcgtttacgccccgccctgccactcatcgcagtactgttgtaattcattaagcattctgccgacatggaagccatcacaaacggcatgatgaacctgaatcgccagcggcatcagcaccttgtcgccttgcgtataatatttgcccatagtgaaaacgggggcgaagaagttgtccatattggccacgtttaaatcaaaactggtgaaactcacccagggattggctgagacgaaaaacatattctcaataaaccctttagggaaataggccaggttttcaccgtaacacgccacatcttgcgaatatatgtgtagaaactgccggaaatcgtcgtggtattcactccagagcgatgaaaacgtttcagtttgctcatggaaaacggtgtaacaagggtgaacactatcccatatcaccagctcaccgtctttcattgccatacggaactccggatgagcattcatcaggcgggcaagaatgtgaataaaggccggataaaacttgtgcttatttttctttacggtctttaaaaaggccgtaatatccagctgaacggtctggttataggtacattgagcaactgactgaaatgcctcaaaatgttctttacgatgccattgggatatatcaacggtggtatatccagtgatttttttctccattttagcttccttagctcctgaaaatctcgataactcaaaaaatacgcccggtagtgatcttatttcattatggtgaaagttggaacctcttacgtgccaagccaaataggccgt

SEQ ID NO: 213 - DNA, 4568 bp, Artificial
  Synthetic
tcagatccttccgtatttagccagtatgttctctagtgtggttcgttgtttttgcgtgagccatgagaacgaaccattgagatcatgcttactttgcatgtcactcaaaaattttgcctcaaaactggtgagctgaatttttgcagttaaagcatcgtgtagtgtttttcttagtccgttacgtaggtaggaatctgatgtaatggttgttggtattttgtcaccattcatttttatctggttgttctcaagttcggttacgagatccatttgtctatctagttcaacttggaaaatcaacgtatcagtcgggcggcctcgcttatcaaccaccaatttcatattgctgtaagtgtttaaatctttacttattggtttcaaaacccattggttaagccttttaaactcatggtagttattttcaagcattaacatgaacttaaattcatcaaggctaatctctatatttgccttgtgagttttcttttgtgttagttcttttaataaccactcataaatcctcatagagtatttgttttcaaaagacttaacatgttccagattatattttatgaatttttttaactggaaaagataaggcaatatctcttcactaaaaactaattctaatttttcgcttgagaacttggcatagtttgtccactggaaaatctcaaagcctttaaccaaaggattcctgatttccacagttctcgtcatcagctctctggttgctttagctaatacaccataagcattttccctactgatgttcatcatctgagcgtattggttataagtgaacgataccgtccgttctttccttgtagggttttcaatcgtggggttgagtagtgccacacagcataaaattagcttggtttcatgctccgttaagtcatagcgactaatcgctagttcatttgctttgaaaacaactaattcagacatacatctcaattggtctaggtgattttaatcactataccaattgagatgggctagtcaatgataattactagtccttttcctttgagttgtgggtatctgtaaattctgctagacctttgctggaaaacttgtaaattctgctagaccctctgtaaattccgctagacctttgtgtgttttttttgtttatattcaagtggttataatttatagaataaagaaagaataaaaaaagataaaaagaatagatcccagccctgtgtataactcactactttagtcagttccgcagtattacaaaaggatgtcgcaaacgctgtttgctcctctacaaaacagaccttaaaaccctaaaggcttaagtagcaccctcgcaagctcgggcaaatcgctgaatattccttttgtctccgaccatcaggcacctgagtcgctgtctttttcgtgacattcagttcgctgcgctcacggctctggcagtgaatgggggtaaatggcactacaggcgccttttatggattcatgcaaggaaactacccataatacaagaaaagcccgtcacgggcttctcagggcgttttatggcgggtctgctatgtggtgctatctgactttttgctgttcagcagttcctgccctctgattttccagtctgaccacttcggattatcccgtgacaggtcattcagactggctaatgcacccagtaaggcagcggtatcatcaacaggcttacccgtcttactgtcaagaggacatccggtcaaataaaacgaaaggctcagtcgaaagactgggcctttcgttttgctgaggagacttagggaccctttatgacaacttgacggctacatcattcactttttcttcacaaccggcacggaactcgctcgggctggccccggtgcattttttaaatacccgcgagaaatagagttgatcgtcaaaaccaacattgcgaccgacggtggcgataggcatccgggtggtgctcaaaagcagcttcgcctggctgatacgttggtcctcgcgccagcttaagacgctaatccctaactgctggcggaaaagatgtgacagacgcgacggcgacaagcaaacatgctgtgcgacgctggcgatatcaaaattgctgtctgccaggtgatcgctgatgtactgacaagcctcgcgtacccgattatccatcggtggatggagcgactcgttaatcgcttccatgcgccgcagtaacaattgctcaagcagatttatcgccagcagctccgaatagcgcccttccccttgcccggcgttaatgatttgcccaaacaggtcgctgaaatgcggctggtgcgcttcatccgggcgaaagaaccccgtattggcaaatattgacggccagttaagccattcatgccagtaggcgcgcggacgaaagtaaacccactggtgataccattcgcgagcctccggatgacgaccgtagtgatgaatctctcctggcgggaacagcaaaatatcacccggtcggcaaacaaattctcgtccctgatttttcaccaccccctgaccgcgaatggtgagattgagaatataacctttcattcccagcggtcggtcgataaaaaaatcgagataaccgttggcctcaatcggcgttaaacccgccaccagatgggcattaaacgagtatcccggcagcaggggatcattttgcgcttcagccatacttttcatactcccaccattcagagaagaaaccaattgtccatattgcatcagacattgccgtcactgcgtcttttactggctcttctcgctaacccaaccggtaaccccgcttattaaaagcattctgtaacaaagcgggaccaaagccatgacaaaaacgcgtaacaaaagtgtctataatcacggcagaaaagtccacattgattatttgcacggcgtcacactttgctatgccatagcatttttatccataagattagcggatcctacctgacgctttttatcgcaactctctactgtttctccatacccgttttacctgcaggtgcagtaggaggaaaaaaaaatggtgagcaagggcgaggaggataacatggccatcatcaaggagttcatgcgcttcaaggtgcacatggagggctccgtgaacggccacgagttcgagatcgagggcgagggcgagggccgcccctacgagggcacccagaccgccaagctgaaggtgaccaagggcggccccctgcccttcgcctgggacatcctgtcccctcagttcatgtacggctccaaggcctacgtgaagcaccccgccgacatccccgactacttgaagctgtccttccccgagggcttcaagtgggagcgcgtgatgaacttcgaggacggcggcgtggtgaccgtgacccaggactcctccctacaggacggcgagttcatctacaaggtgaagctgcgcggcaccaacttcccctccgacggccccgtaatgcagaagaagaccatgggctgggaggcctcctccgagcggatgtaccccgaggacggcgccctgaagggcgagatcaagcagaggctgaagctgaaggacggcggccactacgacgccgaggtcaagaccacctacaaggccaagaagcccgtgcagctgcccggcgcctacaacgtcaacatcaagctggacatcacctcccacaacgaggactacaccatcgtggaacagtacgagcgcgccgagggccgccactccaccggcggcatggacgagctgtacaagtaaacttaattaacggcactcctcagccaagtcaaaagcctccggtcggaggcttttgactacatgcccatggcgtttacgccccgccctgccactcatcgcagtactgttgtaattcattaagcattctgccgacatggaagccatcacaaacggcatgatgaacctgaatcgccagcggcatcagcaccttgtcgccttgcgtataatatttgcccatagtgaaaacgggggcgaagaagttgtccatattggccacgtttaaatcaaaactggtgaaactcacccagggattggctgagacgaaaaacatattctcaataaaccctttagggaaataggccaggttttcaccgtaacacgccacatcttgcgaatatatgtgtagaaactgccggaaatcgtcgtggtattcactccagagcgatgaaaacgtttcagtttgctcatggaaaacggtgtaacaagggtgaacactatcccatatcaccagctcaccgtctttcattgccatacggaactccggatgagcattcatcaggcgggcaagaatgtgaataaaggccggataaaacttgtgcttatttttctttacggtctttaaaaaggccgtaatatccagctgaacggtctggttataggtacattgagcaactgactgaaatgcctcaaaatgttctttacgatgccattgggatatatcaacggtggtatatccagtgatttttttctccattttagcttccttagctcctgaaaatctcgataactcaaaaaatacgcccggtagtgatcttatttcattatggtgaaagttggaacctcttacgtgccaggccaaataggccgt

SEQ ID NO: 214 - DNA, 9576 bp, Artificial
  Synthetic
tcagatccttccgtatttagccagtatgttctctagtgtggttcgttgtttttgcgtgagccatgagaacgaaccattgagatcatgcttactttgcatgtcactcaaaaattttgcctcaaaactggtgagctgaatttttgcagttaaagcatcgtgtagtgtttttcttagtccgttacgtaggtaggaatctgatgtaatggttgttggtattttgtcaccattcatttttatctggttgttctcaagttcggttacgagatccatttgtctatctagttcaacttggaaaatcaacgtatcagtcgggcggcctcgcttatcaaccaccaatttcatattgctgtaagtgtttaaatctttacttattggtttcaaaacccattggttaagccttttaaactcatggtagttattttcaagcattaacatgaacttaaattcatcaaggctaatctctatatttgccttgtgagttttcttttgtgttagttcttttaataaccactcataaatcctcatagagtatttgttttcaaaagacttaacatgttccagattatattttatgaatttttttaactggaaaagataaggcaatatctcttcactaaaaactaattctaatttttcgcttgagaacttggcatagtttgtccactggaaaatccgaaagcctttaaccaaaggattcctgatttccacagttctcgtcatcagctctctggttgctttagctaatacaccataagcattttccctactgatgttcatcatctgagcgtattggttataagtgaacgataccgtccgttctttccttgtagggttttcaatcgtggggttgagtagtgccacacagcataaaattagcttggtttcatgctccgttaagtcatagcgactaatcgctagttcatttgctttgaaaacaactaattcagacatacatctcaattggtctaggtgattttaatcactataccaattgagatgggctagtcaatgataattactagtccttttcctttgagttgtgggtatctgtaaattctgctagacctttgctggaaaacttgtaaattctgctagaccctctgtaaattccgctagacctttgtgtgttttttttgtttatattcaagtggttataatttatagaataaagaaagaataaaaaaagataaaaagaatagatcccagccctgtgtataactcactactttagtcagttccgcagtattacaaaaggatgtcgcaaacgctgtttgctcctctacaaaacagaccttaaaaccctaaaggcttaagtagcaccctcgcaagctcgggcaaatcgctgaatattccttttgtctccgaccatcaggcacctgagtcgctgtctttttcgtgacattcagttcgctgcgctcacggctctggcagtgaatgggggtaaatggcactacaggcgccttttatggattcatgcaaggaaactacccataatacaagaaaagcccgtcacgggcttctcagggcgttttatggcgggtctgctatgtggtgctatctgactttttgctgttcagcagttcctgccctctgattttccagtctgaccacttcggattatcccgtgacaggtcattcagactggctaatgcacccagtaaggcagcggtatcatcaacaggcttacccgtcttactgtcaagaggacatccggtcaaataaaacgaaaggctcagtcgaaagactgggcctttcgttttgctgaggagacttagggaccctttatgacaacttgacggctacatcattcactttttcttcacaaccggcacggaactcgctcgggctggccccggtgcattttttaaatacccgcgagaaatagagttgatcgtcaaaaccaacattgcgaccgacggtggcgataggcatccgggtggtgctcaaaagcagcttcgcctggctgatacgttggtcctcgcgccagcttaagacgctaatccctaactgctggcggaaaagatgtgacagacgcgacggcgacaagcaaacatgctgtgcgacgctggcgatatcaaaattgctgtctgccaggtgatcgctgatgtactgacaagcctcgcgtacccgattatccatcggtggatggagcgactcgttaatcgcttccatgcgccgcagtaacaattgctcaagcagatttatcgccagcagctccgaatagcgcccttccccttgcccggcgttaatgatttgcccaaacaggtcgctgaaatgcggctggtgcgcttcatccgggcgaaagaaccccgtattggcaaatattgacggccagttaagccattcatgccagtaggcgcgcggacgaaagtaaacccactggtgataccattcgcgagcctccggatgacgaccgtagtgatgaatctctcctggcgggaacagcaaaatatcacccggtcggcaaacaaattctcgtccctgatttttcaccaccccctgaccgcgaatggtgagattgagaatataacctttcattcccagcggtcggtcgataaaaaaatcgagataaccgttggcctcaatcggcgttaaacccgccaccagatgggcattaaacgagtatcccggcagcaggggatcattttgcgcttcagccatacttttcatactcccaccattcagagaagaaaccaattgtccatattgcatcagacattgccgtcactgcgtcttttactggctcttctcgctaacccaaccggtaaccccgcttattaaaagcattctgtaacaaagcgggaccaaagccatgacaaaaacgcgtaacaaaagtgtctataatcacggcagaaaagtccacattgattatttgcacggcgtcacactttgctatgccatagcatttttatccataagattagcggatcctacctgacgctttttatcgcaactctctactgtttctccatacccgttttacctgcaggtgcagtgaccgctgactttatcaggtatatcatgaccgaatcttttgcagccctctttgaagaaagtgaattaaacctcaacgttgaaaagggtgcagtcatccaaggtgttgttgtaaacatcgatagcgactgggttactgttgacactggccttaaatcagaaggcattgttgaccgtgctgaatttttaaatgaacaacgtgaacttgaagttcaggttggtgacactgttgacgtagttgttgaagctcttgacaacggtatgggtcaaacagttttatcacgtgaaaaagctaaacgtgctgaaacttggactaaacttgaaaaaatctttgaagatggcgaaatcgttactggtgttatctctggtaaagttaaaggcggtttcactgttgacatcggtcctgttcgtgcgttcttaccaggttcattagttgacactcgtcctatccgtgacactactcaccttgaaggtaaagagttagagtttaaagtaatcaaacttgatgctaaacgtaacaacgttgttgtatctcgtcgtgctgttatggaagctgaatcttctgctgaccgtgaagcattacttgctcaacttgaagaaggtcaaacagttacaggtactatcaagaaccttactgattacggtgcattcgttgatcttggcggtattgatggtcttcttcatatcacagatatggcttggaagcgtatcaagcacccttcagaagttgttgaagttggtcaagaagttactgttaaagtacttaaatttgaccgtgaacgtaaccgcgtatctttaggccttaaacaattaggcgaagatccatggttagcgatcatgagccgttaccctaaaggttctatcgttaaagcacgtgttactaacttaactgactacggttgtttcgctgaaatcgctgaaggcgttgaaggtttagtacacgtttctgaaatggaccacactaacaaaaacatccacccatctaaagttgttcagatcggtgacgaagttgatgttatggttcttgaagttgacgaagaacgtcgtcgtatcagccttggtatcaaacaaactcgtgctaacccatgggaagagtttgctaagtctcatgagaaaggcgaaaaagtttcaggcacaatcaagtctatcactgactttggtatcttcattggtttaaatggcggtatcgacggtctagttcacttgtctgatatttcttggaacgaacaaggcgaagaagctatccgtcgttacaagaaaggtgacactgttgaagcagttatcttgtctgtagacgctgaaggtaaccgtatcagccttggtatcaagcaattgaacagcgatccgttcaatgatttcttagctgctaacgaacgtggtgctttagttaaaggtactgtgactgcagttgatgctcgtggcgcaactgttaagttagctgacgaagtagaagctactcttaaagcttctgaaatcaaccgtgaccgcgttgaagatgcaactaaattcttagaagttggtcaagaagttgaagctaaaatcatcaacgttgatcgtaaatctcgctctatcaacttgtctatcaaagcgaaagacgaagctgaagagaaagaagcagtagctaacttacgtacagcatcagcttctcaagaaaatggtcctaagactattggtgacttgatcaaagcgcaaatgaagtaataagttaacaaagtacagtttcatgtttttaagcatctcggagaaatcgaatggctttaactaatgcagaccgcgcagagatcattgctaaatttgctcgcgctgaaaacgacactggttcaccagaagtacaagtagctttattgactgctcaaatcaatgatttacaaggtcactttaaagctcacaaacacgaccaccatagccgtcgcggtttgatccgtatggttaaccaacgtcgtaaattacttgactacttaaatggtaaagaccacgagcgttacactgctttgatcggtgctttaggtctacgtcgttaattcgattttgctttgttttcggtttcaacttattttcaaggagtgcaagagtggcaaactctgctcaagctaaaaaacgtgcgcgccaaaacgttaaagcgcgtaaacacaacgcaagcttgcgttctatggttcgtacttacatcaaacgtactttaagtgcaatcgctggtggtgattatgctgttgctacagaagcttacaaaaaagctgttcctgtaatcgaccgcatggctgataaaggcatcatccacaaaaataaagctgctcgtcataagagccgtttaaatgctcaagttaaagctttagctaactaattgaagcatgtaaaaaaagcccgtaagaattataaggcttttatcatggttgttattcgtttagcacgtggcggcgcaaaaaaacgtccattctatcaaatcgttgtgactgatagccgcaatgcacgtgatggtcgtttcatcgagcgtatcggtttctttaacccaactgcacaaggtcaagcagaaaaacttcgtttagacgcagaccgttttgctcactgggtttctcaaggtgctcaaccttctgaacgtgttgcttctttggctgctcaagctaaaaaagctactgcataattattgtagtaggtagcccatgacactgtttaaaccgtaaggagctgacaatgcgtcattacgaaatcgtacttttggtacatccagaccaaagcgatcaagttgtaggtatggttgaacgctatatctctcagatcaaagaagctgatggtcaaattcaccgtttagaagattggggccgtcgtcaattggcttacccaattaacaaaattcacaaagcgcactacattcttatgaatgttgaatgtggtcaaactacgcttgatgagttagaagaattattccgttataacgacgcgatcattcgtaaccttatcatccgtcgtgaacacgcaatcactgaagagtcattgcttgctaagagtgctgaagaaaagcgtgcgcgtaaagctcaacgcgaagaagcacagcaagttgctcaagaagctgaataaggagaacatcaatggcacgtttttaccgtcgtcgcaagttctgccgctttacagctgagaatgttgcgtacatcgactacaaagatatcgacactttaaaacagtacatcactgaaaacggcaagattgttcctagccgtatcactggtactaaagctcgttatcaacgtcaattagcacttgctatcaaacaagctcgctatttgtctttgattccgtacactgacaaccataagtgaggtgatctgtggacgttatcttattacaacgcattaagaaccttggtaaattaggcgataaagtatcagttaaagctggttacggccgtaactttcttatccctcaaggtaaagcagttgcagctactgaagctaacactgctgcttttgaagctcgtcgtgctgaacttgagaagcaagaagctgaagtattagctgctgctcaagcacgtgctgaacaattgaatgaagttaacatcgttatcactgctaaagctggtgacgaaggtaaactcttcggttctatcggtactcgtgacatcgctgacgcgttaacgaatgctggtcttacagttgaccgtgcagaagttcgtttaccaaacggtgcgcttcgtcacactggtgaattcaacatcgcaatccaattgcatcatgatgttgttgcagaagttctcgttactatcgtatctgagtaatttctcatcaaaaaaagagcatgctaccaactataataggtagtggtttaatgaaaactctcagcgctaagccagctgaagttcaacatgactggtatgttgttgatgcttctggcaaaactttaggtcgccttgcgactgaaatcgctcgtcgtttacgcggtaagcataaaacttcttatactcctcacgttgacactggcgattacatcgttgtgattaatgctgaacaaattcaagtgactggtaacaaatcacttgataagaaatattatcgccatactggtttccctggtggtatccgtgagactaacttcgagaagttaattgctcacaaacctgaagctgttcttgaaaaagcggttaaaggcatgttaccaaaaggtcctcttggttatgcaatgatcaaaaaaatgaaagtgtacgctggtactgagcatcctcatgctgctcaacagccacaagttttggacatctaagggatacagcacatggctactaattatggtacaggtcgccgtaagaccgcaactgcacgtgttttcttgtcagctggtacaggtaaactcgttattaacaaccgtactttagagcaatatttcggtcgtgaaactgctcgtatggttgttcgtcaacctttagaacttttagaagttactgaaaagtttgacctttacatcactgttaaaggtggtggtatcggtggtcaagctggcgcgatccgtcacggtattactcgtgcgcttatcgctgctgacgaaactttaaaacctgttctacgtcaagctggtttcgttactcgtgatgctcgtgaagttgagcgtaagaaacttggtttacgtaaagctcgtaaacgtcctcaattctctaaacgttaattcgtttaccgaatcggacaaaaagttatccataatctagaggattttacatgccacaagttaagttgaaagaaggcgaaccagttgacgtagctatccgtcgtttcaaacgttcatgcgaaaaagctggtgttttagctgacgttcgtaagcgcgaattctacgaaaaaccaactcaagaacgtaagcgcaaaaaagctgctgcagttaaacgctaccaaaagaaattggctcgcgaatctgtacgtactactcgcctttactaattaatttgtgattgactgctaacattaacccaacttttaaggtaaagaaaatggcagattacaacgtaagcatgcgcgaccttcttcaagcaggtgcgcactttggtcaccaaactcgtttctggaacccaaaaatgcgtcaatacatttttggcgcgcgcaacaaaattcacatcatcaaccttgagcacactgttcctgcgttaaatgatgctttgaacttcgctaaccaattagcaagcaaaaagaacaaagttttgttcgttggtacaaaacgtgctgcttctaacatcatccgtgaacaagctcaacgcgctggtcaaccatatgtagaccaccgttggttaggtggtatgttgacgaactggaaaacacttcgccaatctatcaaccgtttaaaagatcttcaaactcaatctcaagacggtacttttgctaagcttactaaacgtgaagctttagaacgtactcgtgagatggaaaaacttgagcgctctttaggcggcgttaaaaacatgggtggtttacctgacgcattatttgtaatcgacgttgatcacgaagcgattgcaattaaagaagctaagaacttaggtattcctgttatcggtatcgttgatacaaactctaacccagataacgttgattacgttattcctggtaacgacgatgcgatccgtgcagtaactttatatgcttcagctatggctgatgcaattcttgctggtaaagaatacgctcaatctcaagcgaacgctcaagcaaaaggcgatgacgctgcgaaagacgcttctgaggcttaatgcgttttgacgcaggcttgtcattacttaattaacggcactcctcagccaagtcaaaagcctccggtcggaggcttttgactacatgcccatggcgtttacgccccgccctgccactcatcgcagtactgttgtaattcattaagcattctgccgacatggaagccatcacaaacggcatgatgaacctgaatcgccagcggcatcagcaccttgtcgccttgcgtataatatttgcccatagtgaaaacgggggcgaagaagttgtccatattggccacgtttaaatcaaaactggtgaaactcacccagggattggctgagacgaaaaacatattctcaataaaccctttagggaaataggccaggttttcaccgtaacacgccacatcttgcgaatatatgtgtagaaactgccggaaatcgtcgtggtattcactccagagcgatgaaaacgtttcagtttgctcatggaaaacggtgtaacaagggtgaacactatcccatatcaccagctcaccgtctttcattgccatacggaactccggatgagcattcatcaggcgggcaagaatgtgaataaaggccggataaaacttgtgcttatttttctttacggtctttaaaaaggccgtaatatccagctgaacggtctggttataggtacattgagcaactgactgaaatgcctcaaaatgttctttacgatgccattgggatatatcaacggtggtatatccagtgatttttttctccattttagcttccttagctcctgaaaatctcgataactcaaaaaatacgcccggtagtgatcttatttcattatggtgaaagttggaacctcttacgtgccaagccaaataggccgt

SEQ ID NO: 215 - DNA, 7852 bp, Artificial
  Synthetic
tcagatccttccgtatttagccagtatgttctctagtgtggttcgttgtttttgcgtgagccatgagaacgaaccattgagatcatgcttactttgcatgtcactcaaaaattttgcctcaaaactggtgagctgaatttttgcagttaaagcatcgtgtagtgtttttcttagtccgttacgtaggtaggaatctgatgtaatggttgttggtattttgtcaccattcatttttatctggttgttctcaagttcggttacgagatccatttgtctatctagttcaacttggaaaatcaacgtatcagtcgggcggcctcgcttatcaaccaccaatttcatattgctgtaagtgtttaaatctttacttattggtttcaaaacccattggttaagccttttaaactcatggtagttattttcaagcattaacatgaacttaaattcatcaaggctaatctctatatttgccttgtgagttttcttttgtgttagttcttttaataaccactcataaatcctcatagagtatttgttttcaaaagacttaacatgttccagattatattttatgaatttttttaactggaaaagataaggcaatatctcttcactaaaaactaattctaatttttcgcttgagaacttggcatagtttgtccactggaaaatcttaaagcctttaaccaaaggattcctgatttccacagttctcgtcatcagctctctggttgctttagctaatacaccataagcattttccctactgatgttcatcatctgagcgtattggttataagtgaacgataccgtccgttctttccttgtagggttttcaatcgtggggttgagtagtgccacacagcataaaattagcttggtttcatgctccgttaagtcatagcgactaatcgctagttcatttgctttgaaaacaactaattcagacatacatctcaattggtctaggtgattttaatcactataccaattgagatgggctagtcaatgataattactagtccttttcctttgagttgtgggtatctgtaaattctgctagacctttgctggaaaacttgtaaattctgctagaccctctgtaaattccgctagacctttgtgtgttttttttgtttatattcaagtggttataatttatagaataaagaaagaataaaaaaagataaaaagaatagatcccagccctgtgtataactcactactttagtcagttccgcagtattacaaaaggatgtcgcaaacgctgtttgctcctctacaaaacagaccttaaaaccctaaaggcttaagtagcaccctcgcaagctcgggcaaatcgctgaatattccttttgtctccgaccatcaggcacctgagtcgctgtctttttcgtgacattcagttcgctgcgctcacggctctggcagtgaatgggggtaaatggcactacaggcgccttttatggattcatgcaaggaaactacccataatacaagaaaagcccgtcacgggcttctcagggcgttttatggcgggtctgctatgtggtgctatctgactttttgctgttcagcagttcctgccctctgattttccagtctgaccacttcggattatcccgtgacaggtcattcagactggctaatgcacccagtaaggcagcggtatcatcaacaggcttacccgtcttactgtcaagaggacatccggtcaaataaaacgaaaggctcagtcgaaagactgggcctttcgttttgctgaggagacttagggaccctttatgacaacttgacggctacatcattcactttttcttcacaaccggcacggaactcgctcgggctggccccggtgcattttttaaatacccgcgagaaatagagttgatcgtcaaaaccaacattgcgaccgacggtggcgataggcatccgggtggtgctcaaaagcagcttcgcctggctgatacgttggtcctcgcgccagcttaagacgctaatccctaactgctggcggaaaagatgtgacagacgcgacggcgacaagcaaacatgctgtgcgacgctggcgatatcaaaattgctgtctgccaggtgatcgctgatgtactgacaagcctcgcgtacccgattatccatcggtggatggagcgactcgttaatcgcttccatgcgccgcagtaacaattgctcaagcagatttatcgccagcagctccgaatagcgcccttccccttgcccggcgttaatgatttgcccaaacaggtcgctgaaatgcggctggtgcgcttcatccgggcgaaagaaccccgtattggcaaatattgacggccagttaagccattcatgccagtaggcgcgcggacgaaagtaaacccactggtgataccattcgcgagcctccggatgacgaccgtagtgatgaatctctcctggcgggaacagcaaaatatcacccggtcggcaaacaaattctcgtccctgatttttcaccaccccctgaccgcgaatggtgagattgagaatataacctttcattcccagcggtcggtcgataaaaaaatcgagataaccgttggcctcaatcggcgttaaacccgccaccagatgggcattaaacgagtatcccggcagcaggggatcattttgcgcttcagccatacttttcatactcccaccattcagagaagaaaccaattgtccatattgcatcagacattgccgtcactgcgtcttttactggctcttctcgctaacccaaccggtaaccccgcttattaaaagcattctgtaacaaagcgggaccaaagccatgacaaaaacgcgtaacaaaagtgtctataatcacggcagaaaagtccacattgattatttgcacggcgtcacactttgctatgccatagcatttttatccataagattagcggatcctacctgacgctttttatcgcaactctctactgtttctccatacccgttttacctgcaggtgcagttttttaagcatctcggagaaatcgaatggctttaactaatgcagaccgcgcagagatcattgctaaatttgctcgcgctgaaaacgacactggttcaccagaagtacaagtagctttattgactgctcaaatcaatgatttacaaggtcactttaaagctcacaaacacgaccaccatagccgtcgcggtttgatccgtatggttaaccaacgtcgtaaattacttgactacttaaatggtaaagaccacgagcgttacactgctttgatcggtgctttaggtctacgtcgttaattcgattttgctttgttttcggtttcaacttattttcaaggagtgcaagagtggcaaactctgctcaagctaaaaaacgtgcgcgccaaaacgttaaagcgcgtaaacacaacgcaagcttgcgttctatggttcgtacttacatcaaacgtactttaagtgcaatcgctggtggtgattatgctgttgctacagaagcttacaaaaaagctgttcctgtaatcgaccgcatggctgataaaggcatcatccacaaaaataaagctgctcgtcataagagccgtttaaatgctcaagttaaagctttagctaactaattgaagcatgtaaaaaaagcccgtaagaattataaggcttttatcatggttgttattcgtttagcacgtggcggcgcaaaaaaacgtccattctatcaaatcgttgtgactgatagccgcaatgcacgtgatggtcgtttcatcgagcgtatcggtttctttaacccaactgcacaaggtcaagcagaaaaacttcgtttagacgcagaccgttttgctcactgggtttctcaaggtgctcaaccttctgaacgtgttgcttctttggctgctcaagctaaaaaagctactgcataattattgtagtaggtagcccatgacactgtttaaaccgtaaggagctgacaatgcgtcattacgaaatcgtacttttggtacatccagaccaaagcgatcaagttgtaggtatggttgaacgctatatctctcagatcaaagaagctgatggtcaaattcaccgtttagaagattggggccgtcgtcaattggcttacccaattaacaaaattcacaaagcgcactacattcttatgaatgttgaatgtggtcaaactacgcttgatgagttagaagaattattccgttataacgacgcgatcattcgtaaccttatcatccgtcgtgaacacgcaatcactgaagagtcattgcttgctaagagtgctgaagaaaagcgtgcgcgtaaagctcaacgcgaagaagcacagcaagttgctcaagaagctgaataaggagaacatcaatggcacgtttttaccgtcgtcgcaagttctgccgctttacagctgagaatgttgcgtacatcgactacaaagatatcgacactttaaaacagtacatcactgaaaacggcaagattgttcctagccgtatcactggtactaaagctcgttatcaacgtcaattagcacttgctatcaaacaagctcgctatttgtctttgattccgtacactgacaaccataagtgaggtgatctgtggacgttatcttattacaacgcattaagaaccttggtaaattaggcgataaagtatcagttaaagctggttacggccgtaactttcttatccctcaaggtaaagcagttgcagctactgaagctaacactgctgcttttgaagctcgtcgtgctgaacttgagaagcaagaagctgaagtattagctgctgctcaagcacgtgctgaacaattgaatgaagttaacatcgttatcactgctaaagctggtgacgaaggtaaactcttcggttctatcggtactcgtgacatcgctgacgcgttaacgaatgctggtcttacagttgaccgtgcagaagttcgtttaccaaacggtgcgcttcgtcacactggtgaattcaacatcgcaatccaattgcatcatgatgttgttgcagaagttctcgttactatcgtatctgagtaatttctcatcaaaaaaagagcatgctaccaactataataggtagtggtttaatgaaaactctcagcgctaagccagctgaagttcaacatgactggtatgttgttgatgcttctggcaaaactttaggtcgccttgcgactgaaatcgctcgtcgtttacgcggtaagcataaaacttcttatactcctcacgttgacactggcgattacatcgttgtgattaatgctgaacaaattcaagtgactggtaacaaatcacttgataagaaatattatcgccatactggtttccctggtggtatccgtgagactaacttcgagaagttaattgctcacaaacctgaagctgttcttgaaaaagcggttaaaggcatgttaccaaaaggtcctcttggttatgcaatgatcaaaaaaatgaaagtgtacgctggtactgagcatcctcatgctgctcaacagccacaagttttggacatctaagggatacagcacatggctactaattatggtacaggtcgccgtaagaccgcaactgcacgtgttttcttgtcagctggtacaggtaaactcgttattaacaaccgtactttagagcaatatttcggtcgtgaaactgctcgtatggttgttcgtcaacctttagaacttttagaagttactgaaaagtttgacctttacatcactgttaaaggtggtggtatcggtggtcaagctggcgcgatccgtcacggtattactcgtgcgcttatcgctgctgacgaaactttaaaacctgttctacgtcaagctggtttcgttactcgtgatgctcgtgaagttgagcgtaagaaacttggtttacgtaaagctcgtaaacgtcctcaattctctaaacgttaattcgtttaccgaatcggacaaaaagttatccataatctagaggattttacatgccacaagttaagttgaaagaaggcgaaccagttgacgtagctatccgtcgtttcaaacgttcatgcgaaaaagctggtgttttagctgacgttcgtaagcgcgaattctacgaaaaaccaactcaagaacgtaagcgcaaaaaagctgctgcagttaaacgctaccaaaagaaattggctcgcgaatctgtacgtactactcgcctttactaattaatttgtgattgactgctaacattaacccaacttttaaggtaaagaaaatggcagattacaacgtaagcatgcgcgaccttcttcaagcaggtgcgcactttggtcaccaaactcgtttctggaacccaaaaatgcgtcaatacatttttggcgcgcgcaacaaaattcacatcatcaaccttgagcacactgttcctgcgttaaatgatgctttgaacttcgctaaccaattagcaagcaaaaagaacaaagttttgttcgttggtacaaaacgtgctgcttctaacatcatccgtgaacaagctcaacgcgctggtcaaccatatgtagaccaccgttggttaggtggtatgttgacgaactggaaaacacttcgccaatctatcaaccgtttaaaagatcttcaaactcaatctcaagacggtacttttgctaagcttactaaacgtgaagctttagaacgtactcgtgagatggaaaaacttgagcgctctttaggcggcgttaaaaacatgggtggtttacctgacgcattatttgtaatcgacgttgatcacgaagcgattgcaattaaagaagctaagaacttaggtattcctgttatcggtatcgttgatacaaactctaacccagataacgttgattacgttattcctggtaacgacgatgcgatccgtgcagtaactttatatgcttcagctatggctgatgcaattcttgctggtaaagaatacgctcaatctcaagcgaacgctcaagcaaaaggcgatgacgctgcgaaagacgcttctgaggcttaatgcgttttgacgcaggcttgtcattacttaattaacggcactcctcagccaagtcaaaagcctccggtcggaggcttttgactacatgcccatggcgtttacgccccgccctgccactcatcgcagtactgttgtaattcattaagcattctgccgacatggaagccatcacaaacggcatgatgaacctgaatcgccagcggcatcagcaccttgtcgccttgcgtataatatttgcccatagtgaaaacgggggcgaagaagttgtccatattggccacgtttaaatcaaaactggtgaaactcacccagggattggctgagacgaaaaacatattctcaataaaccctttagggaaataggccaggttttcaccgtaacacgccacatcttgcgaatatatgtgtagaaactgccggaaatcgtcgtggtattcactccagagcgatgaaaacgtttcagtttgctcatggaaaacggtgtaacaagggtgaacactatcccatatcaccagctcaccgtctttcattgccatacggaactccggatgagcattcatcaggcgggcaagaatgtgaataaaggccggataaaacttgtgcttatttttctttacggtctttaaaaaggccgtaatatccagctgaacggtctggttataggtacattgagcaactgactgaaatgcctcaaaatgttctttacgatgccattgggatatatcaacggtggtatatccagtgatttttttctccattttagcttccttagctcctgaaaatctcgataactcaaaaaatacgcccggtagtgatcttatttcattatggtgaaagttggaacctcttacgtgccaggccaaataggccgt

SEQ ID NO: 216 - DNA, 9256 bp, Artificial
  Synthetic
tcagatccttccgtatttagccagtatgttctctagtgtggttcgttgtttttgcgtgagccatgagaacgaaccattgagatcatgcttactttgcatgtcactcaaaaattttgcctcaaaactggtgagctgaatttttgcagttaaagcatcgtgtagtgtttttcttagtccgttacgtaggtaggaatctgatgtaatggttgttggtattttgtcaccattcatttttatctggttgttctcaagttcggttacgagatccatttgtctatctagttcaacttggaaaatcaacgtatcagtcgggcggcctcgcttatcaaccaccaatttcatattgctgtaagtgtttaaatctttacttattggtttcaaaacccattggttaagccttttaaactcatggtagttattttcaagcattaacatgaacttaaattcatcaaggctaatctctatatttgccttgtgagttttcttttgtgttagttcttttaataaccactcataaatcctcatagagtatttgttttcaaaagacttaacatgttccagattatattttatgaatttttttaactggaaaagataaggcaatatctcttcactaaaaactaattctaatttttcgcttgagaacttggcatagtttgtccactggaaaatcttaaagcctttaaccaaaggattcctgatttccacagttctcgtcatcagctctctggttgctttagctaatacaccataagcattttccctactgatgttcatcatctgagcgtattggttataagtgaacgataccgtccgttctttccttgtagggttttcaatcgtggggttgagtagtgccacacagcataaaattagcttggtttcatgctccgttaagtcatagcgactaatcgctagttcatttgctttgaaaacaactaattcagacatacatctcaattggtctaggtgattttaatcactataccaattgagatgggctagtcaatgataattactagtccttttcctttgagttgtgggtatctgtaaattctgctagacctttgctggaaaacttgtaaattctgctagaccctctgtaaattccgctagacctttgtgtgttttttttgtttatattcaagtggttataatttatagaataaagaaagaataaaaaaagataaaaagaatagatcccagccctgtgtataactcactactttagtcagttccgcagtattacaaaaggatgtcgcaaacgctgtttgctcctctacaaaacagaccttaaaaccctaaaggcttaagtagcaccctcgcaagctcgggcaaatcgctgaatattccttttgtctccgaccatcaggcacctgagtcgctgtctttttcgtgacattcagttcgctgcgctcacggctctggcagtgaatgggggtaaatggcactacaggcgccttttatggattcatgcaaggaaactacccataatacaagaaaagcccgtcacgggcttctcagggcgttttatggcgggtctgctatgtggtgctatctgactttttgctgttcagcagttcctgccctctgattttccagtctgaccacttcggattatcccgtgacaggtcattcagactggctaatgcacccagtaaggcagcggtatcatcaacaggcttacccgtcttactgtcaagaggacatccggtcaaataaaacgaaaggctcagtcgaaagactgggcctttcgttttgctgaggagacttagggaccctttatgacaacttgacggctacatcattcactttttcttcacaaccggcacggaactcgctcgggctggccccggtgcattttttaaatacccgcgagaaatagagttgatcgtcaaaaccaacattgcgaccgacggtggcgataggcatccgggtggtgctcaaaagcagcttcgcctggctgatacgttggtcctcgcgccagcttaagacgctaatccctaactgctggcggaaaagatgtgacagacgcgacggcgacaagcaaacatgctgtgcgacgctggcgatatcaaaattgctgtctgccaggtgatcgctgatgtactgacaagcctcgcgtacccgattatccatcggtggatggagcgactcgttaatcgcttccatgcgccgcagtaacaattgctcaagcagatttatcgccagcagctccgaatagcgcccttccccttgcccggcgttaatgatttgcccaaacaggtcgctgaaatgcggctggtgcgcttcatccgggcgaaagaaccccgtattggcaaatattgacggccagttaagccattcatgccagtaggcgcgcggacgaaagtaaacccactggtgataccattcgcgagcctccggatgacgaccgtagtgatgaatctctcctggcgggaacagcaaaatatcacccggtcggcaaacaaattctcgtccctgatttttcaccaccccctgaccgcgaatggtgagattgagaatataacctttcattcccagcggtcggtcgataaaaaaatcgagataaccgttggcctcaatcggcgttaaacccgccaccagatgggcattaaacgagtatcccggcagcaggggatcattttgcgcttcagccatacttttcatactcccaccattcagagaagaaaccaattgtccatattgcatcagacattgccgtcactgcgtcttttactggctcttctcgctaacccaaccggtaaccccgcttattaaaagcattctgtaacaaagcgggaccaaagccatgacaaaaacgcgtaacaaaagtgtctataatcacggcagaaaagtccacattgattatttgcacggcgtcacactttgctatgccatagcatttttatccataagattagcggatcctacctgacgctttttatcgcaactctctactgtttctccatacccgttttacctgcaggtgcagtgaccgctgactttatcaggtatatcatgaccgaatcttttgcagccctctttgaagaaagtgaattaaacctcaacgttgaaaagggtgcagtcatccaaggtgttgttgtaaacatcgatagcgactgggttactgttgacactggccttaaatcagaaggcattgttgaccgtgctgaatttttaaatgaacaacgtgaacttgaagttcaggttggtgacactgttgacgtagttgttgaagctcttgacaacggtatgggtcaaacagttttatcacgtgaaaaagctaaacgtgctgaaacttggactaaacttgaaaaaatctttgaagatggcgaaatcgttactggtgttatctctggtaaagttaaaggcggtttcactgttgacatcggtcctgttcgtgcgttcttaccaggttcattagttgacactcgtcctatccgtgacactactcaccttgaaggtaaagagttagagtttaaagtaatcaaacttgatgctaaacgtaacaacgttgttgtatctcgtcgtgctgttatggaagctgaatcttctgctgaccgtgaagcattacttgctcaacttgaagaaggtcaaacagttacaggtactatcaagaaccttactgattacggtgcattcgttgatcttggcggtattgatggtcttcttcatatcacagatatggcttggaagcgtatcaagcacccttcagaagttgttgaagttggtcaagaagttactgttaaagtacttaaatttgaccgtgaacgtaaccgcgtatctttaggccttaaacaattaggcgaagatccatggttagcgatcatgagccgttaccctaaaggttctatcgttaaagcacgtgttactaacttaactgactacggttgtttcgctgaaatcgctgaaggcgttgaaggtttagtacacgtttctgaaatggaccacactaacaaaaacatccacccatctaaagttgttcagatcggtgacgaagttgatgttatggttcttgaagttgacgaagaacgtcgtcgtatcagccttggtatcaaacaaactcgtgctaacccatgggaagagtttgctaagtctcatgagaaaggcgaaaaagtttcaggcacaatcaagtctatcactgactttggtatcttcattggtttaaatggcggtatcgacggtctagttcacttgtctgatatttcttggaacgaacaaggcgaagaagctatccgtcgttacaagaaaggtgacactgttgaagcagttatcttgtctgtagacgctgaaggtaaccgtatcagccttggtatcaagcaattgaacagcgatccgttcaatgatttcttagctgctaacgaacgtggtgctttagttaaaggtactgtgactgcagttgatgctcgtggcgcaactgttaagttagctgacgaagtagaagctactcttaaagcttctgaaatcaaccgtgaccgcgttgaagatgcaactaaattcttagaagttggtcaagaagttgaagctaaaatcatcaacgttgatcgtaaatctcgctctatcaacttgtctatcaaagcgaaagacgaagctgaagagaaagaagcagtagctaacttacgtacagcatcagcttctcaagaaaatggtcctaagactattggtgacttgatcaaagcgcaaatgaagtaataagttaacaaagtacagtttcatgcaacttattttcaaggagtgcaagagtggcaaactctgctcaagctaaaaaacgtgcgcgccaaaacgttaaagcgcgtaaacacaacgcaagcttgcgttctatggttcgtacttacatcaaacgtactttaagtgcaatcgctggtggtgattatgctgttgctacagaagcttacaaaaaagctgttcctgtaatcgaccgcatggctgataaaggcatcatccacaaaaataaagctgctcgtcataagagccgtttaaatgctcaagttaaagctttagctaactaattgaagcatgtaaaaaaagcccgtaagaattataaggcttttatcatggttgttattcgtttagcacgtggcggcgcaaaaaaacgtccattctatcaaatcgttgtgactgatagccgcaatgcacgtgatggtcgtttcatcgagcgtatcggtttctttaacccaactgcacaaggtcaagcagaaaaacttcgtttagacgcagaccgttttgctcactgggtttctcaaggtgctcaaccttctgaacgtgttgcttctttggctgctcaagctaaaaaagctactgcataattattgtagtaggtagcccatgacactgtttaaaccgtaaggagctgacaatgcgtcattacgaaatcgtacttttggtacatccagaccaaagcgatcaagttgtaggtatggttgaacgctatatctctcagatcaaagaagctgatggtcaaattcaccgtttagaagattggggccgtcgtcaattggcttacccaattaacaaaattcacaaagcgcactacattcttatgaatgttgaatgtggtcaaactacgcttgatgagttagaagaattattccgttataacgacgcgatcattcgtaaccttatcatccgtcgtgaacacgcaatcactgaagagtcattgcttgctaagagtgctgaagaaaagcgtgcgcgtaaagctcaacgcgaagaagcacagcaagttgctcaagaagctgaataaggagaacatcaatggcacgtttttaccgtcgtcgcaagttctgccgctttacagctgagaatgttgcgtacatcgactacaaagatatcgacactttaaaacagtacatcactgaaaacggcaagattgttcctagccgtatcactggtactaaagctcgttatcaacgtcaattagcacttgctatcaaacaagctcgctatttgtctttgattccgtacactgacaaccataagtgaggtgatctgtggacgttatcttattacaacgcattaagaaccttggtaaattaggcgataaagtatcagttaaagctggttacggccgtaactttcttatccctcaaggtaaagcagttgcagctactgaagctaacactgctgcttttgaagctcgtcgtgctgaacttgagaagcaagaagctgaagtattagctgctgctcaagcacgtgctgaacaattgaatgaagttaacatcgttatcactgctaaagctggtgacgaaggtaaactcttcggttctatcggtactcgtgacatcgctgacgcgttaacgaatgctggtcttacagttgaccgtgcagaagttcgtttaccaaacggtgcgcttcgtcacactggtgaattcaacatcgcaatccaattgcatcatgatgttgttgcagaagttctcgttactatcgtatctgagtaatttctcatcaaaaaaagagcatgctaccaactataataggtagtggtttaatgaaaactctcagcgctaagccagctgaagttcaacatgactggtatgttgttgatgcttctggcaaaactttaggtcgccttgcgactgaaatcgctcgtcgtttacgcggtaagcataaaacttcttatactcctcacgttgacactggcgattacatcgttgtgattaatgctgaacaaattcaagtgactggtaacaaatcacttgataagaaatattatcgccatactggtttccctggtggtatccgtgagactaacttcgagaagttaattgctcacaaacctgaagctgttcttgaaaaagcggttaaaggcatgttaccaaaaggtcctcttggttatgcaatgatcaaaaaaatgaaagtgtacgctggtactgagcatcctcatgctgctcaacagccacaagttttggacatctaagggatacagcacatggctactaattatggtacaggtcgccgtaagaccgcaactgcacgtgttttcttgtcagctggtacaggtaaactcgttattaacaaccgtactttagagcaatatttcggtcgtgaaactgctcgtatggttgttcgtcaacctttagaacttttagaagttactgaaaagtttgacctttacatcactgttaaaggtggtggtatcggtggtcaagctggcgcgatccgtcacggtattactcgtgcgcttatcgctgctgacgaaactttaaaacctgttctacgtcaagctggtttcgttactcgtgatgctcgtgaagttgagcgtaagaaacttggtttacgtaaagctcgtaaacgtcctcaattctctaaacgttaattcgtttaccgaatcggacaaaaagttatccataatctagaggattttacatgccacaagttaagttgaaagaaggcgaaccagttgacgtagctatccgtcgtttcaaacgttcatgcgaaaaagctggtgttttagctgacgttcgtaagcgcgaattctacgaaaaaccaactcaagaacgtaagcgcaaaaaagctgctgcagttaaacgctaccaaaagaaattggctcgcgaatctgtacgtactactcgcctttactaattaatttgtgattgactgctaacattaacccaacttttaaggtaaagaaaatggcagattacaacgtaagcatgcgcgaccttcttcaagcaggtgcgcactttggtcaccaaactcgtttctggaacccaaaaatgcgtcaatacatttttggcgcgcgcaacaaaattcacatcatcaaccttgagcacactgttcctgcgttaaatgatgctttgaacttcgctaaccaattagcaagcaaaaagaacaaagttttgttcgttggtacaaaacgtgctgcttctaacatcatccgtgaacaagctcaacgcgctggtcaaccatatgtagaccaccgttggttaggtggtatgttgacgaactggaaaacacttcgccaatctatcaaccgtttaaaagatcttcaaactcaatctcaagacggtacttttgctaagcttactaaacgtgaagctttagaacgtactcgtgagatggaaaaacttgagcgctctttaggcggcgttaaaaacatgggtggtttacctgacgcattatttgtaatcgacgttgatcacgaagcgattgcaattaaagaagctaagaacttaggtattcctgttatcggtatcgttgatacaaactctaacccagataacgttgattacgttattcctggtaacgacgatgcgatccgtgcagtaactttatatgcttcagctatggctgatgcaattcttgctggtaaagaatacgctcaatctcaagcgaacgctcaagcaaaaggcgatgacgctgcgaaagacgcttctgaggcttaatgcgttttgacgcaggcttgtcattacttaattaacggcactcctcagccaagtcaaaagcctccggtcggaggcttttgactacatgcccatggcgtttacgccccgccctgccactcatcgcagtactgttgtaattcattaagcattctgccgacatggaagccatcacaaacggcatgatgaacctgaatcgccagcggcatcagcaccttgtcgccttgcgtataatatttgcccatagtgaaaacgggggcgaagaagttgtccatattggccacgtttaaatcaaaactggtgaaactcacccagggattggctgagacgaaaaacatattctcaataaaccctttagggaaataggccaggttttcaccgtaacacgccacatcttgcgaatatatgtgtagaaactgccggaaatcgtcgtggtattcactccagagcgatgaaaacgtttcagtttgctcatggaaaacggtgtaacaagggtgaacactatcccatatcaccagctcaccgtctttcattgccatacggaactccggatgagcattcatcaggcgggcaagaatgtgaataaaggccggataaaacttgtgcttatttttctttacggtctttaaaaaggccgtaatatccagctgaacggtctggttataggtacattgagcaactgactgaaatgcctcaaaatgttctttacgatgccattgggatatatcaacggtggtatatccagtgatttttttctccattttagcttccttagctcctgaaaatctcgataactcaaaaaatacgcccggtagtgatcttatttcattatggtgaaagttggaacctcttacgtgccaggccaaataggccgt

SEQ ID NO: 217 - DNA, 9264 bp, Artificial
  Synthetic
tcagatccttccgtatttagccagtatgttctctagtgtggttcgttgtttttgcgtgagccatgagaacgaaccattgagatcatgcttactttgcatgtcactcaaaaattttgcctcaaaactggtgagctgaatttttgcagttaaagcatcgtgtagtgtttttcttagtccgttacgtaggtaggaatctgatgtaatggttgttggtattttgtcaccattcatttttatctggttgttctcaagttcggttacgagatccatttgtctatctagttcaacttggaaaatcaacgtatcagtcgggcggcctcgcttatcaaccaccaatttcatattgctgtaagtgtttaaatctttacttattggtttcaaaacccattggttaagccttttaaactcatggtagttattttcaagcattaacatgaacttaaattcatcaaggctaatctctatatttgccttgtgagttttcttttgtgttagttcttttaataaccactcataaatcctcatagagtatttgttttcaaaagacttaacatgttccagattatattttatgaatttttttaactggaaaagataaggcaatatctcttcactaaaaactaattctaatttttcgcttgagaacttggcatagtttgtccactggaaaatcttaaagcctttaaccaaaggattcctgatttccacagttctcgtcatcagctctctggttgctttagctaatacaccataagcattttccctactgatgttcatcatctgagcgtattggttataagtgaacgataccgtccgttctttccttgtagggttttcaatcgtggggttgagtagtgccacacagcataaaattagcttggtttcatgctccgttaagtcatagcgactaatcgctagttcatttgctttgaaaacaactaattcagacatacatctcaattggtctaggtgattttaatcactataccaattgagatgggctagtcaatgataattactagtccttttcctttgagttgtgggtatctgtaaattctgctagacctttgctggaaaacttgtaaattctgctagaccctctgtaaattccgctagacctttgtgtgttttttttgtttatattcaagtggttataatttatagaataaagaaagaataaaaaaagataaaaagaatagatcccagccctgtgtataactcactactttagtcagttccgcagtattacaaaaggatgtcgcaaacgctgtttgctcctctacaaaacagaccttaaaaccctaaaggcttaagtagcaccctcgcaagctcgggcaaatcgctgaatattccttttgtctccgaccatcaggcacctgagtcgctgtctttttcgtgacattcagttcgctgcgctcacggctctggcagtgaatgggggtaaatggcactacaggcgccttttatggattcatgcaaggaaactacccataatacaagaaaagcccgtcacgggcttctcagggcgttttatggcgggtctgctatgtggtgctatctgactttttgctgttcagcagttcctgccctctgattttccagtctgaccacttcggattatcccgtgacaggtcattcagactggctaatgcacccagtaaggcagcggtatcatcaacaggcttacccgtcttactgtcaagaggacatccggtcaaataaaacgaaaggctcagtcgaaagactgggcctttcgttttgctgaggagacttagggaccctttatgacaacttgacggctacatcattcactttttcttcacaaccggcacggaactcgctcgggctggccccggtgcattttttaaatacccgcgagaaatagagttgatcgtcaaaaccaacattgcgaccgacggtggcgataggcatccgggtggtgctcaaaagcagcttcgcctggctgatacgttggtcctcgcgccagcttaagacgctaatccctaactgctggcggaaaagatgtgacagacgcgacggcgacaagcaaacatgctgtgcgacgctggcgatatcaaaattgctgtctgccaggtgatcgctgatgtactgacaagcctcgcgtacccgattatccatcggtggatggagcgactcgttaatcgcttccatgcgccgcagtaacaattgctcaagcagatttatcgccagcagctccgaatagcgcccttccccttgcccggcgttaatgatttgcccaaacaggtcgctgaaatgcggctggtgcgcttcatccgggcgaaagaaccccgtattggcaaatattgacggccagttaagccattcatgccagtaggcgcgcggacgaaagtaaacccactggtgataccattcgcgagcctccggatgacgaccgtagtgatgaatctctcctggcgggaacagcaaaatatcacccggtcggcaaacaaattctcgtccctgatttttcaccaccccctgaccgcgaatggtgagattgagaatataacctttcattcccagcggtcggtcgataaaaaaatcgagataaccgttggcctcaatcggcgttaaacccgccaccagatgggcattaaacgagtatcccggcagcaggggatcattttgcgcttcagccatacttttcatactcccaccattcagagaagaaaccaattgtccatattgcatcagacattgccgtcactgcgtcttttactggctcttctcgctaacccaaccggtaaccccgcttattaaaagcattctgtaacaaagcgggaccaaagccatgacaaaaacgcgtaacaaaagtgtctataatcacggcagaaaagtccacattgattatttgcacggcgtcacactttgctatgccatagcatttttatccataagattagcggatcctacctgacgctttttatcgcaactctctactgtttctccatacccgttttacctgcaggtgcagtgaccgctgactttatcaggtatatcatgaccgaatcttttgcagccctctttgaagaaagtgaattaaacctcaacgttgaaaagggtgcagtcatccaaggtgttgttgtaaacatcgatagcgactgggttactgttgacactggccttaaatcagaaggcattgttgaccgtgctgaatttttaaatgaacaacgtgaacttgaagttcaggttggtgacactgttgacgtagttgttgaagctcttgacaacggtatgggtcaaacagttttatcacgtgaaaaagctaaacgtgctgaaacttggactaaacttgaaaaaatctttgaagatggcgaaatcgttactggtgttatctctggtaaagttaaaggcggtttcactgttgacatcggtcctgttcgtgcgttcttaccaggttcattagttgacactcgtcctatccgtgacactactcaccttgaaggtaaagagttagagtttaaagtaatcaaacttgatgctaaacgtaacaacgttgttgtatctcgtcgtgctgttatggaagctgaatcttctgctgaccgtgaagcattacttgctcaacttgaagaaggtcaaacagttacaggtactatcaagaaccttactgattacggtgcattcgttgatcttggcggtattgatggtcttcttcatatcacagatatggcttggaagcgtatcaagcacccttcagaagttgttgaagttggtcaagaagttactgttaaagtacttaaatttgaccgtgaacgtaaccgcgtatctttaggccttaaacaattaggcgaagatccatggttagcgatcatgagccgttaccctaaaggttctatcgttaaagcacgtgttactaacttaactgactacggttgtttcgctgaaatcgctgaaggcgttgaaggtttagtacacgtttctgaaatggaccacactaacaaaaacatccacccatctaaagttgttcagatcggtgacgaagttgatgttatggttcttgaagttgacgaagaacgtcgtcgtatcagccttggtatcaaacaaactcgtgctaacccatgggaagagtttgctaagtctcatgagaaaggcgaaaaagtttcaggcacaatcaagtctatcactgactttggtatcttcattggtttaaatggcggtatcgacggtctagttcacttgtctgatatttcttggaacgaacaaggcgaagaagctatccgtcgttacaagaaaggtgacactgttgaagcagttatcttgtctgtagacgctgaaggtaaccgtatcagccttggtatcaagcaattgaacagcgatccgttcaatgatttcttagctgctaacgaacgtggtgctttagttaaaggtactgtgactgcagttgatgctcgtggcgcaactgttaagttagctgacgaagtagaagctactcttaaagcttctgaaatcaaccgtgaccgcgttgaagatgcaactaaattcttagaagttggtcaagaagttgaagctaaaatcatcaacgttgatcgtaaatctcgctctatcaacttgtctatcaaagcgaaagacgaagctgaagagaaagaagcagtagctaacttacgtacagcatcagcttctcaagaaaatggtcctaagactattggtgacttgatcaaagcgcaaatgaagtaataagttaacaaagtacagtttcatgtttttaagcatctcggagaaatcgaatggctttaactaatgcagaccgcgcagagatcattgctaaatttgctcgcgctgaaaacgacactggttcaccagaagtacaagtagctttattgactgctcaaatcaatgatttacaaggtcactttaaagctcacaaacacgaccaccatagccgtcgcggtttgatccgtatggttaaccaacgtcgtaaattacttgactacttaaatggtaaagaccacgagcgttacactgctttgatcggtgctttaggtctacgtcgttaattcgattttgctttgttttcggtttccgtaagaattataaggcttttatcatggttgttattcgtttagcacgtggcggcgcaaaaaaacgtccattctatcaaatcgttgtgactgatagccgcaatgcacgtgatggtcgtttcatcgagcgtatcggtttctttaacccaactgcacaaggtcaagcagaaaaacttcgtttagacgcagaccgttttgctcactgggtttctcaaggtgctcaaccttctgaacgtgttgcttctttggctgctcaagctaaaaaagctactgcataattattgtagtaggtagcccatgacactgtttaaaccgtaaggagctgacaatgcgtcattacgaaatcgtacttttggtacatccagaccaaagcgatcaagttgtaggtatggttgaacgctatatctctcagatcaaagaagctgatggtcaaattcaccgtttagaagattggggccgtcgtcaattggcttacccaattaacaaaattcacaaagcgcactacattcttatgaatgttgaatgtggtcaaactacgcttgatgagttagaagaattattccgttataacgacgcgatcattcgtaaccttatcatccgtcgtgaacacgcaatcactgaagagtcattgcttgctaagagtgctgaagaaaagcgtgcgcgtaaagctcaacgcgaagaagcacagcaagttgctcaagaagctgaataaggagaacatcaatggcacgtttttaccgtcgtcgcaagttctgccgctttacagctgagaatgttgcgtacatcgactacaaagatatcgacactttaaaacagtacatcactgaaaacggcaagattgttcctagccgtatcactggtactaaagctcgttatcaacgtcaattagcacttgctatcaaacaagctcgctatttgtctttgattccgtacactgacaaccataagtgaggtgatctgtggacgttatcttattacaacgcattaagaaccttggtaaattaggcgataaagtatcagttaaagctggttacggccgtaactttcttatccctcaaggtaaagcagttgcagctactgaagctaacactgctgcttttgaagctcgtcgtgctgaacttgagaagcaagaagctgaagtattagctgctgctcaagcacgtgctgaacaattgaatgaagttaacatcgttatcactgctaaagctggtgacgaaggtaaactcttcggttctatcggtactcgtgacatcgctgacgcgttaacgaatgctggtcttacagttgaccgtgcagaagttcgtttaccaaacggtgcgcttcgtcacactggtgaattcaacatcgcaatccaattgcatcatgatgttgttgcagaagttctcgttactatcgtatctgagtaatttctcatcaaaaaaagagcatgctaccaactataataggtagtggtttaatgaaaactctcagcgctaagccagctgaagttcaacatgactggtatgttgttgatgcttctggcaaaactttaggtcgccttgcgactgaaatcgctcgtcgtttacgcggtaagcataaaacttcttatactcctcacgttgacactggcgattacatcgttgtgattaatgctgaacaaattcaagtgactggtaacaaatcacttgataagaaatattatcgccatactggtttccctggtggtatccgtgagactaacttcgagaagttaattgctcacaaacctgaagctgttcttgaaaaagcggttaaaggcatgttaccaaaaggtcctcttggttatgcaatgatcaaaaaaatgaaagtgtacgctggtactgagcatcctcatgctgctcaacagccacaagttttggacatctaagggatacagcacatggctactaattatggtacaggtcgccgtaagaccgcaactgcacgtgttttcttgtcagctggtacaggtaaactcgttattaacaaccgtactttagagcaatatttcggtcgtgaaactgctcgtatggttgttcgtcaacctttagaacttttagaagttactgaaaagtttgacctttacatcactgttaaaggtggtggtatcggtggtcaagctggcgcgatccgtcacggtattactcgtgcgcttatcgctgctgacgaaactttaaaacctgttctacgtcaagctggtttcgttactcgtgatgctcgtgaagttgagcgtaagaaacttggtttacgtaaagctcgtaaacgtcctcaattctctaaacgttaattcgtttaccgaatcggacaaaaagttatccataatctagaggattttacatgccacaagttaagttgaaagaaggcgaaccagttgacgtagctatccgtcgtttcaaacgttcatgcgaaaaagctggtgttttagctgacgttcgtaagcgcgaattctacgaaaaaccaactcaagaacgtaagcgcaaaaaagctgctgcagttaaacgctaccaaaagaaattggctcgcgaatctgtacgtactactcgcctttactaattaatttgtgattgactgctaacattaacccaacttttaaggtaaagaaaatggcagattacaacgtaagcatgcgcgaccttcttcaagcaggtgcgcactttggtcaccaaactcgtttctggaacccaaaaatgcgtcaatacatttttggcgcgcgcaacaaaattcacatcatcaaccttgagcacactgttcctgcgttaaatgatgctttgaacttcgctaaccaattagcaagcaaaaagaacaaagttttgttcgttggtacaaaacgtgctgcttctaacatcatccgtgaacaagctcaacgcgctggtcaaccatatgtagaccaccgttggttaggtggtatgttgacgaactggaaaacacttcgccaatctatcaaccgtttaaaagatcttcaaactcaatctcaagacggtacttttgctaagcttactaaacgtgaagctttagaacgtactcgtgagatggaaaaacttgagcgctctttaggcggcgttaaaaacatgggtggtttacctgacgcattatttgtaatcgacgttgatcacgaagcgattgcaattaaagaagctaagaacttaggtattcctgttatcggtatcgttgatacaaactctaacccagataacgttgattacgttattcctggtaacgacgatgcgatccgtgcagtaactttatatgcttcagctatggctgatgcaattcttgctggtaaagaatacgctcaatctcaagcgaacgctcaagcaaaaggcgatgacgctgcgaaagacgcttctgaggcttaatgcgttttgacgcaggcttgtcattacttaattaacggcactcctcagccaagtcaaaagcctccggtcggaggcttttgactacatgcccatggcgtttacgccccgccctgccactcatcgcagtactgttgtaattcattaagcattctgccgacatggaagccatcacaaacggcatgatgaacctgaatcgccagcggcatcagcaccttgtcgccttgcgtataatatttgcccatagtgaaaacgggggcgaagaagttgtccatattggccacgtttaaatcaaaactggtgaaactcacccagggattggctgagacgaaaaacatattctcaataaaccctttagggaaataggccaggttttcaccgtaacacgccacatcttgcgaatatatgtgtagaaactgccggaaatcgtcgtggtattcactccagagcgatgaaaacgtttcagtttgctcatggaaaacggtgtaacaagggtgaacactatcccatatcaccagctcaccgtctttcattgccatacggaactccggatgagcattcatcaggcgggcaagaatgtgaataaaggccggataaaacttgtgcttatttttctttacggtctttaaaaaggccgtaatatccagctgaacggtctggttataggtacattgagcaactgactgaaatgcctcaaaatgttctttacgatgccattgggatatatcaacggtggtatatccagtgatttttttctccattttagcttccttagctcctgaaaatctcgataactcaaaaaatacgcccggtagtgatcttatttcattatggtgaaagttggaacctcttacgtgccaggccaaataggccgt

SEQ ID NO: 218 - DNA, 9274 bp, Artificial
  Synthetic
tcagatccttccgtatttagccagtatgttctctagtgtggttcgttgtttttgcgtgagccatgagaacgaaccattgagatcatgcttactttgcatgtcactcaaaaattttgcctcaaaactggtgagctgaatttttgcagttaaagcatcgtgtagtgtttttcttagtccgttacgtaggtaggaatctgatgtaatggttgttggtattttgtcaccattcatttttatctggttgttctcaagttcggttacgagatccatttgtctatctagttcaacttggaaaatcaacgtatcagtcgggcggcctcgcttatcaaccaccaatttcatattgctgtaagtgtttaaatctttacttattggtttcaaaacccattggttaagccttttaaactcatggtagttattttcaagcattaacatgaacttaaattcatcaaggctaatctctatatttgccttgtgagttttcttttgtgttagttcttttaataaccactcataaatcctcatagagtatttgttttcaaaagacttaacatgttccagattatattttatgaatttttttaactggaaaagataaggcaatatctcttcactaaaaactaattctaatttttcgcttgagaacttggcatagtttgtccactggaaaatcttaaagcctttaaccaaaggattcctgatttccacagttctcgtcatcagctctctggttgctttagctaatacaccataagcattttccctactgatgttcatcatctgagcgtattggttataagtgaacgataccgtccgttctttccttgtagggttttcaatcgtggggttgagtagtgccacacagcataaaattagcttggtttcatgctccgttaagtcatagcgactaatcgctagttcatttgctttgaaaacaactaattcagacatacatctcaattggtctaggtgattttaatcactataccaattgagatgggctagtcaatgataattactagtccttttcctttgagttgtgggtatctgtaaattctgctagacctttgctggaaaacttgtaaattctgctagaccctctgtaaattccgctagacctttgtgtgttttttttgtttatattcaagtggttataatttatagaataaagaaagaataaaaaaagataaaaagaatagatcccagccctgtgtataactcactactttagtcagttccgcagtattacaaaaggatgtcgcaaacgctgtttgctcctctacaaaacagaccttaaaaccctaaaggcttaagtagcaccctcgcaagctcgggcaaatcgctgaatattccttttgtctccgaccatcaggcacctgagtcgctgtctttttcgtgacattcagttcgctgcgctcacggctctggcagtgaatgggggtaaatggcactacaggcgccttttatggattcatgcaaggaaactacccataatacaagaaaagcccgtcacgggcttctcagggcgttttatggcgggtctgctatgtggtgctatctgactttttgctgttcagcagttcctgccctctgattttccagtctgaccacttcggattatcccgtgacaggtcattcagactggctaatgcacccagtaaggcagcggtatcatcaacaggcttacccgtcttactgtcaagaggacatccggtcaaataaaacgaaaggctcagtcgaaagactgggcctttcgttttgctgaggagacttagggaccctttatgacaacttgacggctacatcattcactttttcttcacaaccggcacggaactcgctcgggctggccccggtgcattttttaaatacccgcgagaaatagagttgatcgtcaaaaccaacattgcgaccgacggtggcgataggcatccgggtggtgctcaaaagcagcttcgcctggctgatacgttggtcctcgcgccagcttaagacgctaatccctaactgctggcggaaaagatgtgacagacgcgacggcgacaagcaaacatgctgtgcgacgctggcgatatcaaaattgctgtctgccaggtgatcgctgatgtactgacaagcctcgcgtacccgattatccatcggtggatggagcgactcgttaatcgcttccatgcgccgcagtaacaattgctcaagcagatttatcgccagcagctccgaatagcgcccttccccttgcccggcgttaatgatttgcccaaacaggtcgctgaaatgcggctggtgcgcttcatccgggcgaaagaaccccgtattggcaaatattgacggccagttaagccattcatgccagtaggcgcgcggacgaaagtaaacccactggtgataccattcgcgagcctccggatgacgaccgtagtgatgaatctctcctggcgggaacagcaaaatatcacccggtcggcaaacaaattctcgtccctgatttttcaccaccccctgaccgcgaatggtgagattgagaatataacctttcattcccagcggtcggtcgataaaaaaatcgagataaccgttggcctcaatcggcgttaaacccgccaccagatgggcattaaacgagtatcccggcagcaggggatcattttgcgcttcagccatacttttcatactcccaccattcagagaagaaaccaattgtccatattgcatcagacattgccgtcactgcgtcttttactggctcttctcgctaacccaaccggtaaccccgcttattaaaagcattctgtaacaaagcgggaccaaagccatgacaaaaacgcgtaacaaaagtgtctataatcacggcagaaaagtccacattgattatttgcacggcgtcacactttgctatgccatagcatttttatccataagattagcggatcctacctgacgctttttatcgcaactctctactgtttctccatacccgttttacctgcaggtgcagtgaccgctgactttatcaggtatatcatgaccgaatcttttgcagccctctttgaagaaagtgaattaaacctcaacgttgaaaagggtgcagtcatccaaggtgttgttgtaaacatcgatagcgactgggttactgttgacactggccttaaatcagaaggcattgttgaccgtgctgaatttttaaatgaacaacgtgaacttgaagttcaggttggtgacactgttgacgtagttgttgaagctcttgacaacggtatgggtcaaacagttttatcacgtgaaaaagctaaacgtgctgaaacttggactaaacttgaaaaaatctttgaagatggcgaaatcgttactggtgttatctctggtaaagttaaaggcggtttcactgttgacatcggtcctgttcgtgcgttcttaccaggttcattagttgacactcgtcctatccgtgacactactcaccttgaaggtaaagagttagagtttaaagtaatcaaacttgatgctaaacgtaacaacgttgttgtatctcgtcgtgctgttatggaagctgaatcttctgctgaccgtgaagcattacttgctcaacttgaagaaggtcaaacagttacaggtactatcaagaaccttactgattacggtgcattcgttgatcttggcggtattgatggtcttcttcatatcacagatatggcttggaagcgtatcaagcacccttcagaagttgttgaagttggtcaagaagttactgttaaagtacttaaatttgaccgtgaacgtaaccgcgtatctttaggccttaaacaattaggcgaagatccatggttagcgatcatgagccgttaccctaaaggttctatcgttaaagcacgtgttactaacttaactgactacggttgtttcgctgaaatcgctgaaggcgttgaaggtttagtacacgtttctgaaatggaccacactaacaaaaacatccacccatctaaagttgttcagatcggtgacgaagttgatgttatggttcttgaagttgacgaagaacgtcgtcgtatcagccttggtatcaaacaaactcgtgctaacccatgggaagagtttgctaagtctcatgagaaaggcgaaaaagtttcaggcacaatcaagtctatcactgactttggtatcttcattggtttaaatggcggtatcgacggtctagttcacttgtctgatatttcttggaacgaacaaggcgaagaagctatccgtcgttacaagaaaggtgacactgttgaagcagttatcttgtctgtagacgctgaaggtaaccgtatcagccttggtatcaagcaattgaacagcgatccgttcaatgatttcttagctgctaacgaacgtggtgctttagttaaaggtactgtgactgcagttgatgctcgtggcgcaactgttaagttagctgacgaagtagaagctactcttaaagcttctgaaatcaaccgtgaccgcgttgaagatgcaactaaattcttagaagttggtcaagaagttgaagctaaaatcatcaacgttgatcgtaaatctcgctctatcaacttgtctatcaaagcgaaagacgaagctgaagagaaagaagcagtagctaacttacgtacagcatcagcttctcaagaaaatggtcctaagactattggtgacttgatcaaagcgcaaatgaagtaataagttaacaaagtacagtttcatgtttttaagcatctcggagaaatcgaatggctttaactaatgcagaccgcgcagagatcattgctaaatttgctcgcgctgaaaacgacactggttcaccagaagtacaagtagctttattgactgctcaaatcaatgatttacaaggtcactttaaagctcacaaacacgaccaccatagccgtcgcggtttgatccgtatggttaaccaacgtcgtaaattacttgactacttaaatggtaaagaccacgagcgttacactgctttgatcggtgctttaggtctacgtcgttaattcgattttgctttgttttcggtttcaacttattttcaaggagtgcaagagtggcaaactctgctcaagctaaaaaacgtgcgcgccaaaacgttaaagcgcgtaaacacaacgcaagcttgcgttctatggttcgtacttacatcaaacgtactttaagtgcaatcgctggtggtgattatgctgttgctacagaagcttacaaaaaagctgttcctgtaatcgaccgcatggctgataaaggcatcatccacaaaaataaagctgctcgtcataagagccgtttaaatgctcaagttaaagctttagctaactaattgaagcatgtaaaaaaagcctgtttaaaccgtaaggagctgacaatgcgtcattacgaaatcgtacttttggtacatccagaccaaagcgatcaagttgtaggtatggttgaacgctatatctctcagatcaaagaagctgatggtcaaattcaccgtttagaagattggggccgtcgtcaattggcttacccaattaacaaaattcacaaagcgcactacattcttatgaatgttgaatgtggtcaaactacgcttgatgagttagaagaattattccgttataacgacgcgatcattcgtaaccttatcatccgtcgtgaacacgcaatcactgaagagtcattgcttgctaagagtgctgaagaaaagcgtgcgcgtaaagctcaacgcgaagaagcacagcaagttgctcaagaagctgaataaggagaacatcaatggcacgtttttaccgtcgtcgcaagttctgccgctttacagctgagaatgttgcgtacatcgactacaaagatatcgacactttaaaacagtacatcactgaaaacggcaagattgttcctagccgtatcactggtactaaagctcgttatcaacgtcaattagcacttgctatcaaacaagctcgctatttgtctttgattccgtacactgacaaccataagtgaggtgatctgtggacgttatcttattacaacgcattaagaaccttggtaaattaggcgataaagtatcagttaaagctggttacggccgtaactttcttatccctcaaggtaaagcagttgcagctactgaagctaacactgctgcttttgaagctcgtcgtgctgaacttgagaagcaagaagctgaagtattagctgctgctcaagcacgtgctgaacaattgaatgaagttaacatcgttatcactgctaaagctggtgacgaaggtaaactcttcggttctatcggtactcgtgacatcgctgacgcgttaacgaatgctggtcttacagttgaccgtgcagaagttcgtttaccaaacggtgcgcttcgtcacactggtgaattcaacatcgcaatccaattgcatcatgatgttgttgcagaagttctcgttactatcgtatctgagtaatttctcatcaaaaaaagagcatgctaccaactataataggtagtggtttaatgaaaactctcagcgctaagccagctgaagttcaacatgactggtatgttgttgatgcttctggcaaaactttaggtcgccttgcgactgaaatcgctcgtcgtttacgcggtaagcataaaacttcttatactcctcacgttgacactggcgattacatcgttgtgattaatgctgaacaaattcaagtgactggtaacaaatcacttgataagaaatattatcgccatactggtttccctggtggtatccgtgagactaacttcgagaagttaattgctcacaaacctgaagctgttcttgaaaaagcggttaaaggcatgttaccaaaaggtcctcttggttatgcaatgatcaaaaaaatgaaagtgtacgctggtactgagcatcctcatgctgctcaacagccacaagttttggacatctaagggatacagcacatggctactaattatggtacaggtcgccgtaagaccgcaactgcacgtgttttcttgtcagctggtacaggtaaactcgttattaacaaccgtactttagagcaatatttcggtcgtgaaactgctcgtatggttgttcgtcaacctttagaacttttagaagttactgaaaagtttgacctttacatcactgttaaaggtggtggtatcggtggtcaagctggcgcgatccgtcacggtattactcgtgcgcttatcgctgctgacgaaactttaaaacctgttctacgtcaagctggtttcgttactcgtgatgctcgtgaagttgagcgtaagaaacttggtttacgtaaagctcgtaaacgtcctcaattctctaaacgttaattcgtttaccgaatcggacaaaaagttatccataatctagaggattttacatgccacaagttaagttgaaagaaggcgaaccagttgacgtagctatccgtcgtttcaaacgttcatgcgaaaaagctggtgttttagctgacgttcgtaagcgcgaattctacgaaaaaccaactcaagaacgtaagcgcaaaaaagctgctgcagttaaacgctaccaaaagaaattggctcgcgaatctgtacgtactactcgcctttactaattaatttgtgattgactgctaacattaacccaacttttaaggtaaagaaaatggcagattacaacgtaagcatgcgcgaccttcttcaagcaggtgcgcactttggtcaccaaactcgtttctggaacccaaaaatgcgtcaatacatttttggcgcgcgcaacaaaattcacatcatcaaccttgagcacactgttcctgcgttaaatgatgctttgaacttcgctaaccaattagcaagcaaaaagaacaaagttttgttcgttggtacaaaacgtgctgcttctaacatcatccgtgaacaagctcaacgcgctggtcaaccatatgtagaccaccgttggttaggtggtatgttgacgaactggaaaacacttcgccaatctatcaaccgtttaaaagatcttcaaactcaatctcaagacggtacttttgctaagcttactaaacgtgaagctttagaacgtactcgtgagatggaaaaacttgagcgctctttaggcggcgttaaaaacatgggtggtttacctgacgcattatttgtaatcgacgttgatcacgaagcgattgcaattaaagaagctaagaacttaggtattcctgttatcggtatcgttgatacaaactctaacccagataacgttgattacgttattcctggtaacgacgatgcgatccgtgcagtaactttatatgcttcagctatggctgatgcaattcttgctggtaaagaatacgctcaatctcaagcgaacgctcaagcaaaaggcgatgacgctgcgaaagacgcttctgaggcttaatgcgttttgacgcaggcttgtcattacttaattaacggcactcctcagccaagtcaaaagcctccggtcggaggcttttgactacatgcccatggcgtttacgccccgccctgccactcatcgcagtactgttgtaattcattaagcattctgccgacatggaagccatcacaaacggcatgatgaacctgaatcgccagcggcatcagcaccttgtcgccttgcgtataatatttgcccatagtgaaaacgggggcgaagaagttgtccatattggccacgtttaaatcaaaactggtgaaactcacccagggattggctgagacgaaaaacatattctcaataaaccctttagggaaataggccaggttttcaccgtaacacgccacatcttgcgaatatatgtgtagaaactgccggaaatcgtcgtggtattcactccagagcgatgaaaacgtttcagtttgctcatggaaaacggtgtaacaagggtgaacactatcccatatcaccagctcaccgtctttcattgccatacggaactccggatgagcattcatcaggcgggcaagaatgtgaataaaggccggataaaacttgtgcttatttttctttacggtctttaaaaaggccgtaatatccagctgaacggtctggttataggtacattgagcaactgactgaaatgcctcaaaatgttctttacgatgccattgggatatatcaacggtggtatatccagtgatttttttctccattttagcttccttagctcctgaaaatctcgataactcaaaaaatacgcccggtagtgatcttatttcattatggtgaaagttggaacctcttacgtgccaggccaaataggccgt

SEQ ID NO: 219 - DNA, 9181 bp, Artificial
  Synthetic
tcagatccttccgtatttagccagtatgttctctagtgtggttcgttgtttttgcgtgagccatgagaacgaaccattgagatcatgcttactttgcatgtcactcaaaaattttgcctcaaaactggtgagctgaatttttgcagttaaagcatcgtgtagtgtttttcttagtccgttacgtaggtaggaatctgatgtaatggttgttggtattttgtcaccattcatttttatctggttgttctcaagttcggttacgagatccatttgtctatctagttcaacttggaaaatcaacgtatcagtcgggcggcctcgcttatcaaccaccaatttcatattgctgtaagtgtttaaatctttacttattggtttcaaaacccattggttaagccttttaaactcatggtagttattttcaagcattaacatgaacttaaattcatcaaggctaatctctatatttgccttgtgagttttcttttgtgttagttcttttaataaccactcataaatcctcatagagtatttgttttcaaaagacttaacatgttccagattatattttatgaatttttttaactggaaaagataaggcaatatctcttcactaaaaactaattctaatttttcgcttgagaacttggcatagtttgtccactggaaaatcttaaagcctttaaccaaaggattcctgatttccacagttctcgtcatcagctctctggttgctttagctaatacaccataagcattttccctactgatgttcatcatctgagcgtattggttataagtgaacgataccgtccgttctttccttgtagggttttcaatcgtggggttgagtagtgccacacagcataaaattagcttggtttcatgctccgttaagtcatagcgactaatcgctagttcatttgctttgaaaacaactaattcagacatacatctcaattggtctaggtgattttaatcactataccaattgagatgggctagtcaatgataattactagtccttttcctttgagttgtgggtatctgtaaattctgctagacctttgctggaaaacttgtaaattctgctagaccctctgtaaattccgctagacctttgtgtgttttttttgtttatattcaagtggttataatttatagaataaagaaagaataaaaaaagataaaaagaatagatcccagccctgtgtataactcactactttagtcagttccgcagtattacaaaaggatgtcgcaaacgctgtttgctcctctacaaaacagaccttaaaaccctaaaggcttaagtagcaccctcgcaagctcgggcaaatcgctgaatattccttttgtctccgaccatcaggcacctgagtcgctgtctttttcgtgacattcagttcgctgcgctcacggctctggcagtgaatgggggtaaatggcactacaggcgccttttatggattcatgcaaggaaactacccataatacaagaaaagcccgtcacgggcttctcagggcgttttatggcgggtctgctatgtggtgctatctgactttttgctgttcagcagttcctgccctctgattttccagtctgaccacttcggattatcccgtgacaggtcattcagactggctaatgcacccagtaaggcagcggtatcatcaacaggcttacccgtcttactgtcaagaggacatccggtcaaataaaacgaaaggctcagtcgaaagactgggcctttcgttttgctgaggagacttagggaccctttatgacaacttgacggctacatcattcactttttcttcacaaccggcacggaactcgctcgggctggccccggtgcattttttaaatacccgcgagaaatagagttgatcgtcaaaaccaacattgcgaccgacggtggcgataggcatccgggtggtgctcaaaagcagcttcgcctggctgatacgttggtcctcgcgccagcttaagacgctaatccctaactgctggcggaaaagatgtgacagacgcgacggcgacaagcaaacatgctgtgcgacgctggcgatatcaaaattgctgtctgccaggtgatcgctgatgtactgacaagcctcgcgtacccgattatccatcggtggatggagcgactcgttaatcgcttccatgcgccgcagtaacaattgctcaagcagatttatcgccagcagctccgaatagcgcccttccccttgcccggcgttaatgatttgcccaaacaggtcgctgaaatgcggctggtgcgcttcatccgggcgaaagaaccccgtattggcaaatattgacggccagttaagccattcatgccagtaggcgcgcggacgaaagtaaacccactggtgataccattcgcgagcctccggatgacgaccgtagtgatgaatctctcctggcgggaacagcaaaatatcacccggtcggcaaacaaattctcgtccctgatttttcaccaccccctgaccgcgaatggtgagattgagaatataacctttcattcccagcggtcggtcgataaaaaaatcgagataaccgttggcctcaatcggcgttaaacccgccaccagatgggcattaaacgagtatcccggcagcaggggatcattttgcgcttcagccatacttttcatactcccaccattcagagaagaaaccaattgtccatattgcatcagacattgccgtcactgcgtcttttactggctcttctcgctaacccaaccggtaaccccgcttattaaaagcattctgtaacaaagcgggaccaaagccatgacaaaaacgcgtaacaaaagtgtctataatcacggcagaaaagtccacattgattatttgcacggcgtcacactttgctatgccatagcatttttatccataagattagcggatcctacctgacgctttttatcgcaactctctactgtttctccatacccgttttacctgcaggtgcagtgaccgctgactttatcaggtatatcatgaccgaatcttttgcagccctctttgaagaaagtgaattaaacctcaacgttgaaaagggtgcagtcatccaaggtgttgttgtaaacatcgatagcgactgggttactgttgacactggccttaaatcagaaggcattgttgaccgtgctgaatttttaaatgaacaacgtgaacttgaagttcaggttggtgacactgttgacgtagttgttgaagctcttgacaacggtatgggtcaaacagttttatcacgtgaaaaagctaaacgtgctgaaacttggactaaacttgaaaaaatctttgaagatggcgaaatcgttactggtgttatctctggtaaagttaaaggcggtttcactgttgacatcggtcctgttcgtgcgttcttaccaggttcattagttgacactcgtcctatccgtgacactactcaccttgaaggtaaagagttagagtttaaagtaatcaaacttgatgctaaacgtaacaacgttgttgtatctcgtcgtgctgttatggaagctgaatcttctgctgaccgtgaagcattacttgctcaacttgaagaaggtcaaacagttacaggtactatcaagaaccttactgattacggtgcattcgttgatcttggcggtattgatggtcttcttcatatcacagatatggcttggaagcgtatcaagcacccttcagaagttgttgaagttggtcaagaagttactgttaaagtacttaaatttgaccgtgaacgtaaccgcgtatctttaggccttaaacaattaggcgaagatccatggttagcgatcatgagccgttaccctaaaggttctatcgttaaagcacgtgttactaacttaactgactacggttgtttcgctgaaatcgctgaaggcgttgaaggtttagtacacgtttctgaaatggaccacactaacaaaaacatccacccatctaaagttgttcagatcggtgacgaagttgatgttatggttcttgaagttgacgaagaacgtcgtcgtatcagccttggtatcaaacaaactcgtgctaacccatgggaagagtttgctaagtctcatgagaaaggcgaaaaagtttcaggcacaatcaagtctatcactgactttggtatcttcattggtttaaatggcggtatcgacggtctagttcacttgtctgatatttcttggaacgaacaaggcgaagaagctatccgtcgttacaagaaaggtgacactgttgaagcagttatcttgtctgtagacgctgaaggtaaccgtatcagccttggtatcaagcaattgaacagcgatccgttcaatgatttcttagctgctaacgaacgtggtgctttagttaaaggtactgtgactgcagttgatgctcgtggcgcaactgttaagttagctgacgaagtagaagctactcttaaagcttctgaaatcaaccgtgaccgcgttgaagatgcaactaaattcttagaagttggtcaagaagttgaagctaaaatcatcaacgttgatcgtaaatctcgctctatcaacttgtctatcaaagcgaaagacgaagctgaagagaaagaagcagtagctaacttacgtacagcatcagcttctcaagaaaatggtcctaagactattggtgacttgatcaaagcgcaaatgaagtaataagttaacaaagtacagtttcatgtttttaagcatctcggagaaatcgaatggctttaactaatgcagaccgcgcagagatcattgctaaatttgctcgcgctgaaaacgacactggttcaccagaagtacaagtagctttattgactgctcaaatcaatgatttacaaggtcactttaaagctcacaaacacgaccaccatagccgtcgcggtttgatccgtatggttaaccaacgtcgtaaattacttgactacttaaatggtaaagaccacgagcgttacactgctttgatcggtgctttaggtctacgtcgttaattcgattttgctttgttttcggtttcaacttattttcaaggagtgcaagagtggcaaactctgctcaagctaaaaaacgtgcgcgccaaaacgttaaagcgcgtaaacacaacgcaagcttgcgttctatggttcgtacttacatcaaacgtactttaagtgcaatcgctggtggtgattatgctgttgctacagaagcttacaaaaaagctgttcctgtaatcgaccgcatggctgataaaggcatcatccacaaaaataaagctgctcgtcataagagccgtttaaatgctcaagttaaagctttagctaactaattgaagcatgtaaaaaaagcccgtaagaattataaggcttttatcatggttgttattcgtttagcacgtggcggcgcaaaaaaacgtccattctatcaaatcgttgtgactgatagccgcaatgcacgtgatggtcgtttcatcgagcgtatcggtttctttaacccaactgcacaaggtcaagcagaaaaacttcgtttagacgcagaccgttttgctcactgggtttctcaaggtgctcaaccttctgaacgtgttgcttctttggctgctcaagctaaaaaagctactgcataattattgtagtaggtagcccatgacaaagaagctgaataaggagaacatcaatggcacgtttttaccgtcgtcgcaagttctgccgctttacagctgagaatgttgcgtacatcgactacaaagatatcgacactttaaaacagtacatcactgaaaacggcaagattgttcctagccgtatcactggtactaaagctcgttatcaacgtcaattagcacttgctatcaaacaagctcgctatttgtctttgattccgtacactgacaaccataagtgaggtgatctgtggacgttatcttattacaacgcattaagaaccttggtaaattaggcgataaagtatcagttaaagctggttacggccgtaactttcttatccctcaaggtaaagcagttgcagctactgaagctaacactgctgcttttgaagctcgtcgtgctgaacttgagaagcaagaagctgaagtattagctgctgctcaagcacgtgctgaacaattgaatgaagttaacatcgttatcactgctaaagctggtgacgaaggtaaactcttcggttctatcggtactcgtgacatcgctgacgcgttaacgaatgctggtcttacagttgaccgtgcagaagttcgtttaccaaacggtgcgcttcgtcacactggtgaattcaacatcgcaatccaattgcatcatgatgttgttgcagaagttctcgttactatcgtatctgagtaatttctcatcaaaaaaagagcatgctaccaactataataggtagtggtttaatgaaaactctcagcgctaagccagctgaagttcaacatgactggtatgttgttgatgcttctggcaaaactttaggtcgccttgcgactgaaatcgctcgtcgtttacgcggtaagcataaaacttcttatactcctcacgttgacactggcgattacatcgttgtgattaatgctgaacaaattcaagtgactggtaacaaatcacttgataagaaatattatcgccatactggtttccctggtggtatccgtgagactaacttcgagaagttaattgctcacaaacctgaagctgttcttgaaaaagcggttaaaggcatgttaccaaaaggtcctcttggttatgcaatgatcaaaaaaatgaaagtgtacgctggtactgagcatcctcatgctgctcaacagccacaagttttggacatctaagggatacagcacatggctactaattatggtacaggtcgccgtaagaccgcaactgcacgtgttttcttgtcagctggtacaggtaaactcgttattaacaaccgtactttagagcaatatttcggtcgtgaaactgctcgtatggttgttcgtcaacctttagaacttttagaagttactgaaaagtttgacctttacatcactgttaaaggtggtggtatcggtggtcaagctggcgcgatccgtcacggtattactcgtgcgcttatcgctgctgacgaaactttaaaacctgttctacgtcaagctggtttcgttactcgtgatgctcgtgaagttgagcgtaagaaacttggtttacgtaaagctcgtaaacgtcctcaattctctaaacgttaattcgtttaccgaatcggacaaaaagttatccataatctagaggattttacatgccacaagttaagttgaaagaaggcgaaccagttgacgtagctatccgtcgtttcaaacgttcatgcgaaaaagctggtgttttagctgacgttcgtaagcgcgaattctacgaaaaaccaactcaagaacgtaagcgcaaaaaagctgctgcagttaaacgctaccaaaagaaattggctcgcgaatctgtacgtactactcgcctttactaattaatttgtgattgactgctaacattaacccaacttttaaggtaaagaaaatggcagattacaacgtaagcatgcgcgaccttcttcaagcaggtgcgcactttggtcaccaaactcgtttctggaacccaaaaatgcgtcaatacatttttggcgcgcgcaacaaaattcacatcatcaaccttgagcacactgttcctgcgttaaatgatgctttgaacttcgctaaccaattagcaagcaaaaagaacaaagttttgttcgttggtacaaaacgtgctgcttctaacatcatccgtgaacaagctcaacgcgctggtcaaccatatgtagaccaccgttggttaggtggtatgttgacgaactggaaaacacttcgccaatctatcaaccgtttaaaagatcttcaaactcaatctcaagacggtacttttgctaagcttactaaacgtgaagctttagaacgtactcgtgagatggaaaaacttgagcgctctttaggcggcgttaaaaacatgggtggtttacctgacgcattatttgtaatcgacgttgatcacgaagcgattgcaattaaagaagctaagaacttaggtattcctgttatcggtatcgttgatacaaactctaacccagataacgttgattacgttattcctggtaacgacgatgcgatccgtgcagtaactttatatgcttcagctatggctgatgcaattcttgctggtaaagaatacgctcaatctcaagcgaacgctcaagcaaaaggcgatgacgctgcgaaagacgcttctgaggcttaatgcgttttgacgcaggcttgtcattacttaattaacggcactcctcagccaagtcaaaagcctccggtcggaggcttttgactacatgcccatggcgtttacgccccgccctgccactcatcgcagtactgttgtaattcattaagcattctgccgacatggaagccatcacaaacggcatgatgaacctgaatcgccagcggcatcagcaccttgtcgccttgcgtataatatttgcccatagtgaaaacgggggcgaagaagttgtccatattggccacgtttaaatcaaaactggtgaaactcacccagggattggctgagacgaaaaacatattctcaataaaccctttagggaaataggccaggttttcaccgtaacacgccacatcttgcgaatatatgtgtagaaactgccggaaatcgtcgtggtattcactccagagcgatgaaaacgtttcagtttgctcatggaaaacggtgtaacaagggtgaacactatcccatatcaccagctcaccgtctttcattgccatacggaactccggatgagcattcatcaggcgggcaagaatgtgaataaaggccggataaaacttgtgcttatttttctttacggtctttaaaaaggccgtaatatccagctgaacggtctggttataggtacattgagcaactgactgaaatgcctcaaaatgttctttacgatgccattgggatatatcaacggtggtatatccagtgatttttttctccattttagcttccttagctcctgaaaatctcgataactcaaaaaatacgcccggtagtgatcttatttcattatggtgaaagttggaacctcttacgtgccaggccaaataggccgt

SEQ ID NO: 220 - DNA, 9379 bp, Artificial
  Synthetic
tcagatccttccgtatttagccagtatgttctctagtgtggttcgttgtttttgcgtgagccatgagaacgaaccattgagatcatgcttactttgcatgtcactcaaaaattttgcctcaaaactggtgagctgaatttttgcagttaaagcatcgtgtagtgtttttcttagtccgttacgtaggtaggaatctgatgtaatggttgttggtattttgtcaccattcatttttatctggttgttctcaagttcggttacgagatccatttgtctatctagttcaacttggaaaatcaacgtatcagtcgggcggcctcgcttatcaaccaccaatttcatattgctgtaagtgtttaaatctttacttattggtttcaaaacccattggttaagccttttaaactcatggtagttattttcaagcattaacatgaacttaaattcatcaaggctaatctctatatttgccttgtgagttttcttttgtgttagttcttttaataaccactcataaatcctcatagagtatttgttttcaaaagacttaacatgttccagattatattttatgaatttttttaactggaaaagataaggcaatatctcttcactaaaaactaattctaatttttcgcttgagaacttggcatagtttgtccactggaaaatcttaaagcctttaaccaaaggattcctgatttccacagttctcgtcatcagctctctggttgctttagctaatacaccataagcattttccctactgatgttcatcatctgagcgtattggttataagtgaacgataccgtccgttctttccttgtagggttttcaatcgtggggttgagtagtgccacacagcataaaattagcttggtttcatgctccgttaagtcatagcgactaatcgctagttcatttgctttgaaaacaactaattcagacatacatctcaattggtctaggtgattttaatcactataccaattgagatgggctagtcaatgataattactagtccttttcctttgagttgtgggtatctgtaaattctgctagacctttgctggaaaacttgtaaattctgctagaccctctgtaaattccgctagacctttgtgtgttttttttgtttatattcaagtggttataatttatagaataaagaaagaataaaaaaagataaaaagaatagatcccagccctgtgtataactcactactttagtcagttccgcagtattacaaaaggatgtcgcaaacgctgtttgctcctctacaaaacagaccttaaaaccctaaaggcttaagtagcaccctcgcaagctcgggcaaatcgctgaatattccttttgtctccgaccatcaggcacctgagtcgctgtctttttcgtgacattcagttcgctgcgctcacggctctggcagtgaatgggggtaaatggcactacaggcgccttttatggattcatgcaaggaaactacccataatacaagaaaagcccgtcacgggcttctcagggcgttttatggcgggtctgctatgtggtgctatctgactttttgctgttcagcagttcctgccctctgattttccagtctgaccacttcggattatcccgtgacaggtcattcagactggctaatgcacccagtaaggcagcggtatcatcaacaggcttacccgtcttactgtcaagaggacatccggtcaaataaaacgaaaggctcagtcgaaagactgggcctttcgttttgctgaggagacttagggaccctttatgacaacttgacggctacatcattcactttttcttcacaaccggcacggaactcgctcgggctggccccggtgcattttttaaatacccgcgagaaatagagttgatcgtcaaaaccaacattgcgaccgacggtggcgataggcatccgggtggtgctcaaaagcagcttcgcctggctgatacgttggtcctcgcgccagcttaagacgctaatccctaactgctggcggaaaagatgtgacagacgcgacggcgacaagcaaacatgctgtgcgacgctggcgatatcaaaattgctgtctgccaggtgatcgctgatgtactgacaagcctcgcgtacccgattatccatcggtggatggagcgactcgttaatcgcttccatgcgccgcagtaacaattgctcaagcagatttatcgccagcagctccgaatagcgcccttccccttgcccggcgttaatgatttgcccaaacaggtcgctgaaatgcggctggtgcgcttcatccgggcgaaagaaccccgtattggcaaatattgacggccagttaagccattcatgccagtaggcgcgcggacgaaagtaaacccactggtgataccattcgcgagcctccggatgacgaccgtagtgatgaatctctcctggcgggaacagcaaaatatcacccggtcggcaaacaaattctcgtccctgatttttcaccaccccctgaccgcgaatggtgagattgagaatataacctttcattcccagcggtcggtcgataaaaaaatcgagataaccgttggcctcaatcggcgttaaacccgccaccagatgggcattaaacgagtatcccggcagcaggggatcattttgcgcttcagccatacttttcatactcccaccattcagagaagaaaccaattgtccatattgcatcagacattgccgtcactgcgtcttttactggctcttctcgctaacccaaccggtaaccccgcttattaaaagcattctgtaacaaagcgggaccaaagccatgacaaaaacgcgtaacaaaagtgtctataatcacggcagaaaagtccacattgattatttgcacggcgtcacactttgctatgccatagcatttttatccataagattagcggatcctacctgacgctttttatcgcaactctctactgtttctccatacccgttttacctgcaggtgcagtgaccgctgactttatcaggtatatcatgaccgaatcttttgcagccctctttgaagaaagtgaattaaacctcaacgttgaaaagggtgcagtcatccaaggtgttgttgtaaacatcgatagcgactgggttactgttgacactggccttaaatcagaaggcattgttgaccgtgctgaatttttaaatgaacaacgtgaacttgaagttcaggttggtgacactgttgacgtagttgttgaagctcttgacaacggtatgggtcaaacagttttatcacgtgaaaaagctaaacgtgctgaaacttggactaaacttgaaaaaatctttgaagatggcgaaatcgttactggtgttatctctggtaaagttaaaggcggtttcactgttgacatcggtcctgttcgtgcgttcttaccaggttcattagttgacactcgtcctatccgtgacactactcaccttgaaggtaaagagttagagtttaaagtaatcaaacttgatgctaaacgtaacaacgttgttgtatctcgtcgtgctgttatggaagctgaatcttctgctgaccgtgaagcattacttgctcaacttgaagaaggtcaaacagttacaggtactatcaagaaccttactgattacggtgcattcgttgatcttggcggtattgatggtcttcttcatatcacagatatggcttggaagcgtatcaagcacccttcagaagttgttgaagttggtcaagaagttactgttaaagtacttaaatttgaccgtgaacgtaaccgcgtatctttaggccttaaacaattaggcgaagatccatggttagcgatcatgagccgttaccctaaaggttctatcgttaaagcacgtgttactaacttaactgactacggttgtttcgctgaaatcgctgaaggcgttgaaggtttagtacacgtttctgaaatggaccacactaacaaaaacatccacccatctaaagttgttcagatcggtgacgaagttgatgttatggttcttgaagttgacgaagaacgtcgtcgtatcagccttggtatcaaacaaactcgtgctaacccatgggaagagtttgctaagtctcatgagaaaggcgaaaaagtttcaggcacaatcaagtctatcactgactttggtatcttcattggtttaaatggcggtatcgacggtctagttcacttgtctgatatttcttggaacgaacaaggcgaagaagctatccgtcgttacaagaaaggtgacactgttgaagcagttatcttgtctgtagacgctgaaggtaaccgtatcagccttggtatcaagcaattgaacagcgatccgttcaatgatttcttagctgctaacgaacgtggtgctttagttaaaggtactgtgactgcagttgatgctcgtggcgcaactgttaagttagctgacgaagtagaagctactcttaaagcttctgaaatcaaccgtgaccgcgttgaagatgcaactaaattcttagaagttggtcaagaagttgaagctaaaatcatcaacgttgatcgtaaatctcgctctatcaacttgtctatcaaagcgaaagacgaagctgaagagaaagaagcagtagctaacttacgtacagcatcagcttctcaagaaaatggtcctaagactattggtgacttgatcaaagcgcaaatgaagtaataagttaacaaagtacagtttcatgtttttaagcatctcggagaaatcgaatggctttaactaatgcagaccgcgcagagatcattgctaaatttgctcgcgctgaaaacgacactggttcaccagaagtacaagtagctttattgactgctcaaatcaatgatttacaaggtcactttaaagctcacaaacacgaccaccatagccgtcgcggtttgatccgtatggttaaccaacgtcgtaaattacttgactacttaaatggtaaagaccacgagcgttacactgctttgatcggtgctttaggtctacgtcgttaattcgattttgctttgttttcggtttcaacttattttcaaggagtgcaagagtggcaaactctgctcaagctaaaaaacgtgcgcgccaaaacgttaaagcgcgtaaacacaacgcaagcttgcgttctatggttcgtacttacatcaaacgtactttaagtgcaatcgctggtggtgattatgctgttgctacagaagcttacaaaaaagctgttcctgtaatcgaccgcatggctgataaaggcatcatccacaaaaataaagctgctcgtcataagagccgtttaaatgctcaagttaaagctttagctaactaattgaagcatgtaaaaaaagcccgtaagaattataaggcttttatcatggttgttattcgtttagcacgtggcggcgcaaaaaaacgtccattctatcaaatcgttgtgactgatagccgcaatgcacgtgatggtcgtttcatcgagcgtatcggtttctttaacccaactgcacaaggtcaagcagaaaaacttcgtttagacgcagaccgttttgctcactgggtttctcaaggtgctcaaccttctgaacgtgttgcttctttggctgctcaagctaaaaaagctactgcataattattgtagtaggtagcccatgacactgtttaaaccgtaaggagctgacaatgcgtcattacgaaatcgtacttttggtacatccagaccaaagcgatcaagttgtaggtatggttgaacgctatatctctcagatcaaagaagctgatggtcaaattcaccgtttagaagattggggccgtcgtcaattggcttacccaattaacaaaattcacaaagcgcactacattcttatgaatgttgaatgtggtcaaactacgcttgatgagttagaagaattattccgttataacgacgcgatcattcgtaaccttatcatccgtcgtgaacacgcaatcactgaagagtcattgcttgctaagagtgctgaagaaaagcgtgcgcgtaaagctcaacgcgaagaagcacagcaagttgctcaagaagctgaataaggagaacatcaatggcacgtttttactgacaaccataagtgaggtgatctgtggacgttatcttattacaacgcattaagaaccttggtaaattaggcgataaagtatcagttaaagctggttacggccgtaactttcttatccctcaaggtaaagcagttgcagctactgaagctaacactgctgcttttgaagctcgtcgtgctgaacttgagaagcaagaagctgaagtattagctgctgctcaagcacgtgctgaacaattgaatgaagttaacatcgttatcactgctaaagctggtgacgaaggtaaactcttcggttctatcggtactcgtgacatcgctgacgcgttaacgaatgctggtcttacagttgaccgtgcagaagttcgtttaccaaacggtgcgcttcgtcacactggtgaattcaacatcgcaatccaattgcatcatgatgttgttgcagaagttctcgttactatcgtatctgagtaatttctcatcaaaaaaagagcatgctaccaactataataggtagtggtttaatgaaaactctcagcgctaagccagctgaagttcaacatgactggtatgttgttgatgcttctggcaaaactttaggtcgccttgcgactgaaatcgctcgtcgtttacgcggtaagcataaaacttcttatactcctcacgttgacactggcgattacatcgttgtgattaatgctgaacaaattcaagtgactggtaacaaatcacttgataagaaatattatcgccatactggtttccctggtggtatccgtgagactaacttcgagaagttaattgctcacaaacctgaagctgttcttgaaaaagcggttaaaggcatgttaccaaaaggtcctcttggttatgcaatgatcaaaaaaatgaaagtgtacgctggtactgagcatcctcatgctgctcaacagccacaagttttggacatctaagggatacagcacatggctactaattatggtacaggtcgccgtaagaccgcaactgcacgtgttttcttgtcagctggtacaggtaaactcgttattaacaaccgtactttagagcaatatttcggtcgtgaaactgctcgtatggttgttcgtcaacctttagaacttttagaagttactgaaaagtttgacctttacatcactgttaaaggtggtggtatcggtggtcaagctggcgcgatccgtcacggtattactcgtgcgcttatcgctgctgacgaaactttaaaacctgttctacgtcaagctggtttcgttactcgtgatgctcgtgaagttgagcgtaagaaacttggtttacgtaaagctcgtaaacgtcctcaattctctaaacgttaattcgtttaccgaatcggacaaaaagttatccataatctagaggattttacatgccacaagttaagttgaaagaaggcgaaccagttgacgtagctatccgtcgtttcaaacgttcatgcgaaaaagctggtgttttagctgacgttcgtaagcgcgaattctacgaaaaaccaactcaagaacgtaagcgcaaaaaagctgctgcagttaaacgctaccaaaagaaattggctcgcgaatctgtacgtactactcgcctttactaattaatttgtgattgactgctaacattaacccaacttttaaggtaaagaaaatggcagattacaacgtaagcatgcgcgaccttcttcaagcaggtgcgcactttggtcaccaaactcgtttctggaacccaaaaatgcgtcaatacatttttggcgcgcgcaacaaaattcacatcatcaaccttgagcacactgttcctgcgttaaatgatgctttgaacttcgctaaccaattagcaagcaaaaagaacaaagttttgttcgttggtacaaaacgtgctgcttctaacatcatccgtgaacaagctcaacgcgctggtcaaccatatgtagaccaccgttggttaggtggtatgttgacgaactggaaaacacttcgccaatctatcaaccgtttaaaagatcttcaaactcaatctcaagacggtacttttgctaagcttactaaacgtgaagctttagaacgtactcgtgagatggaaaaacttgagcgctctttaggcggcgttaaaaacatgggtggtttacctgacgcattatttgtaatcgacgttgatcacgaagcgattgcaattaaagaagctaagaacttaggtattcctgttatcggtatcgttgatacaaactctaacccagataacgttgattacgttattcctggtaacgacgatgcgatccgtgcagtaactttatatgcttcagctatggctgatgcaattcttgctggtaaagaatacgctcaatctcaagcgaacgctcaagcaaaaggcgatgacgctgcgaaagacgcttctgaggcttaatgcgttttgacgcaggcttgtcattacttaattaacggcactcctcagccaagtcaaaagcctccggtcggaggcttttgactacatgcccatggcgtttacgccccgccctgccactcatcgcagtactgttgtaattcattaagcattctgccgacatggaagccatcacaaacggcatgatgaacctgaatcgccagcggcatcagcaccttgtcgccttgcgtataatatttgcccatagtgaaaacgggggcgaagaagttgtccatattggccacgtttaaatcaaaactggtgaaactcacccagggattggctgagacgaaaaacatattctcaataaaccctttagggaaataggccaggttttcaccgtaacacgccacatcttgcgaatatatgtgtagaaactgccggaaatcgtcgtggtattcactccagagcgatgaaaacgtttcagtttgctcatggaaaacggtgtaacaagggtgaacactatcccatatcaccagctcaccgtctttcattgccatacggaactccggatgagcattcatcaggcgggcaagaatgtgaataaaggccggataaaacttgtgcttatttttctttacggtctttaaaaaggccgtaatatccagctgaacggtctggttataggtacattgagcaactgactgaaatgcctcaaaatgttctttacgatgccattgggatatatcaacggtggtatatccagtgatttttttctccattttagcttccttagctcctgaaaatctcgataactcaaaaaatacgcccggtagtgatcttatttcattatggtgaaagttggaacctcttacgtgccaggccaaataggccgt

SEQ ID NO: 221 - DNA, 9121 bp, Artificial
  Synthetic
tcagatccttccgtatttagccagtatgttctctagtgtggttcgttgtttttgcgtgagccatgagaacgaaccattgagatcatgcttactttgcatgtcactcaaaaattttgcctcaaaactggtgagctgaatttttgcagttaaagcatcgtgtagtgtttttcttagtccgttacgtaggtaggaatctgatgtaatggttgttggtattttgtcaccattcatttttatctggttgttctcaagttcggttacgagatccatttgtctatctagttcaacttggaaaatcaacgtatcagtcgggcggcctcgcttatcaaccaccaatttcatattgctgtaagtgtttaaatctttacttattggtttcaaaacccattggttaagccttttaaactcatggtagttattttcaagcattaacatgaacttaaattcatcaaggctaatctctatatttgccttgtgagttttcttttgtgttagttcttttaataaccactcataaatcctcatagagtatttgttttcaaaagacttaacatgttccagattatattttatgaatttttttaactggaaaagataaggcaatatctcttcactaaaaactaattctaatttttcgcttgagaacttggcatagtttgtccactggaaaatcttaaagcctttaaccaaaggattcctgatttccacagttctcgtcatcagctctctggttgctttagctaatacaccataagcattttccctactgatgttcatcatctgagcgtattggttataagtgaacgataccgtccgttctttccttgtagggttttcaatcgtggggttgagtagtgccacacagcataaaattagcttggtttcatgctccgttaagtcatagcgactaatcgctagttcatttgctttgaaaacaactaattcagacatacatctcaattggtctaggtgattttaatcactataccaattgagatgggctagtcaatgataattactagtccttttcctttgagttgtgggtatctgtaaattctgctagacctttgctggaaaacttgtaaattctgctagaccctctgtaaattccgctagacctttgtgtgttttttttgtttatattcaagtggttataatttatagaataaagaaagaataaaaaaagataaaaagaatagatcccagccctgtgtataactcactactttagtcagttccgcagtattacaaaaggatgtcgcaaacgctgtttgctcctctacaaaacagaccttaaaaccctaaaggcttaagtagcaccctcgcaagctcgggcaaatcgctgaatattccttttgtctccgaccatcaggcacctgagtcgctgtctttttcgtgacattcagttcgctgcgctcacggctctggcagtgaatgggggtaaatggcactacaggcgccttttatggattcatgcaaggaaactacccataatacaagaaaagcccgtcacgggcttctcagggcgttttatggcgggtctgctatgtggtgctatctgactttttgctgttcagcagttcctgccctctgattttccagtctgaccacttcggattatcccgtgacaggtcattcagactggctaatgcacccagtaaggcagcggtatcatcaacaggcttacccgtcttactgtcaagaggacatccggtcaaataaaacgaaaggctcagtcgaaagactgggcctttcgttttgctgaggagacttagggaccctttatgacaacttgacggctacatcattcactttttcttcacaaccggcacggaactcgctcgggctggccccggtgcattttttaaatacccgcgagaaatagagttgatcgtcaaaaccaacattgcgaccgacggtggcgataggcatccgggtggtgctcaaaagcagcttcgcctggctgatacgttggtcctcgcgccagcttaagacgctaatccctaactgctggcggaaaagatgtgacagacgcgacggcgacaagcaaacatgctgtgcgacgctggcgatatcaaaattgctgtctgccaggtgatcgctgatgtactgacaagcctcgcgtacccgattatccatcggtggatggagcgactcgttaatcgcttccatgcgccgcagtaacaattgctcaagcagatttatcgccagcagctccgaatagcgcccttccccttgcccggcgttaatgatttgcccaaacaggtcgctgaaatgcggctggtgcgcttcatccgggcgaaagaaccccgtattggcaaatattgacggccagttaagccattcatgccagtaggcgcgcggacgaaagtaaacccactggtgataccattcgcgagcctccggatgacgaccgtagtgatgaatctctcctggcgggaacagcaaaatatcacccggtcggcaaacaaattctcgtccctgatttttcaccaccccctgaccgcgaatggtgagattgagaatataacctttcattcccagcggtcggtcgataaaaaaatcgagataaccgttggcctcaatcggcgttaaacccgccaccagatgggcattaaacgagtatcccggcagcaggggatcattttgcgcttcagccatacttttcatactcccaccattcagagaagaaaccaattgtccatattgcatcagacattgccgtcactgcgtcttttactggctcttctcgctaacccaaccggtaaccccgcttattaaaagcattctgtaacaaagcgggaccaaagccatgacaaaaacgcgtaacaaaagtgtctataatcacggcagaaaagtccacattgattatttgcacggcgtcacactttgctatgccatagcatttttatccataagattagcggatcctacctgacgctttttatcgcaactctctactgtttctccatacccgttttacctgcaggtgcagtgaccgctgactttatcaggtatatcatgaccgaatcttttgcagccctctttgaagaaagtgaattaaacctcaacgttgaaaagggtgcagtcatccaaggtgttgttgtaaacatcgatagcgactgggttactgttgacactggccttaaatcagaaggcattgttgaccgtgctgaatttttaaatgaacaacgtgaacttgaagttcaggttggtgacactgttgacgtagttgttgaagctcttgacaacggtatgggtcaaacagttttatcacgtgaaaaagctaaacgtgctgaaacttggactaaacttgaaaaaatctttgaagatggcgaaatcgttactggtgttatctctggtaaagttaaaggcggtttcactgttgacatcggtcctgttcgtgcgttcttaccaggttcattagttgacactcgtcctatccgtgacactactcaccttgaaggtaaagagttagagtttaaagtaatcaaacttgatgctaaacgtaacaacgttgttgtatctcgtcgtgctgttatggaagctgaatcttctgctgaccgtgaagcattacttgctcaacttgaagaaggtcaaacagttacaggtactatcaagaaccttactgattacggtgcattcgttgatcttggcggtattgatggtcttcttcatatcacagatatggcttggaagcgtatcaagcacccttcagaagttgttgaagttggtcaagaagttactgttaaagtacttaaatttgaccgtgaacgtaaccgcgtatctttaggccttaaacaattaggcgaagatccatggttagcgatcatgagccgttaccctaaaggttctatcgttaaagcacgtgttactaacttaactgactacggttgtttcgctgaaatcgctgaaggcgttgaaggtttagtacacgtttctgaaatggaccacactaacaaaaacatccacccatctaaagttgttcagatcggtgacgaagttgatgttatggttcttgaagttgacgaagaacgtcgtcgtatcagccttggtatcaaacaaactcgtgctaacccatgggaagagtttgctaagtctcatgagaaaggcgaaaaagtttcaggcacaatcaagtctatcactgactttggtatcttcattggtttaaatggcggtatcgacggtctagttcacttgtctgatatttcttggaacgaacaaggcgaagaagctatccgtcgttacaagaaaggtgacactgttgaagcagttatcttgtctgtagacgctgaaggtaaccgtatcagccttggtatcaagcaattgaacagcgatccgttcaatgatttcttagctgctaacgaacgtggtgctttagttaaaggtactgtgactgcagttgatgctcgtggcgcaactgttaagttagctgacgaagtagaagctactcttaaagcttctgaaatcaaccgtgaccgcgttgaagatgcaactaaattcttagaagttggtcaagaagttgaagctaaaatcatcaacgttgatcgtaaatctcgctctatcaacttgtctatcaaagcgaaagacgaagctgaagagaaagaagcagtagctaacttacgtacagcatcagcttctcaagaaaatggtcctaagactattggtgacttgatcaaagcgcaaatgaagtaataagttaacaaagtacagtttcatgtttttaagcatctcggagaaatcgaatggctttaactaatgcagaccgcgcagagatcattgctaaatttgctcgcgctgaaaacgacactggttcaccagaagtacaagtagctttattgactgctcaaatcaatgatttacaaggtcactttaaagctcacaaacacgaccaccatagccgtcgcggtttgatccgtatggttaaccaacgtcgtaaattacttgactacttaaatggtaaagaccacgagcgttacactgctttgatcggtgctttaggtctacgtcgttaattcgattttgctttgttttcggtttcaacttattttcaaggagtgcaagagtggcaaactctgctcaagctaaaaaacgtgcgcgccaaaacgttaaagcgcgtaaacacaacgcaagcttgcgttctatggttcgtacttacatcaaacgtactttaagtgcaatcgctggtggtgattatgctgttgctacagaagcttacaaaaaagctgttcctgtaatcgaccgcatggctgataaaggcatcatccacaaaaataaagctgctcgtcataagagccgtttaaatgctcaagttaaagctttagctaactaattgaagcatgtaaaaaaagcccgtaagaattataaggcttttatcatggttgttattcgtttagcacgtggcggcgcaaaaaaacgtccattctatcaaatcgttgtgactgatagccgcaatgcacgtgatggtcgtttcatcgagcgtatcggtttctttaacccaactgcacaaggtcaagcagaaaaacttcgtttagacgcagaccgttttgctcactgggtttctcaaggtgctcaaccttctgaacgtgttgcttctttggctgctcaagctaaaaaagctactgcataattattgtagtaggtagcccatgacactgtttaaaccgtaaggagctgacaatgcgtcattacgaaatcgtacttttggtacatccagaccaaagcgatcaagttgtaggtatggttgaacgctatatctctcagatcaaagaagctgatggtcaaattcaccgtttagaagattggggccgtcgtcaattggcttacccaattaacaaaattcacaaagcgcactacattcttatgaatgttgaatgtggtcaaactacgcttgatgagttagaagaattattccgttataacgacgcgatcattcgtaaccttatcatccgtcgtgaacacgcaatcactgaagagtcattgcttgctaagagtgctgaagaaaagcgtgcgcgtaaagctcaacgcgaagaagcacagcaagttgctcaagaagctgaataaggagaacatcaatggcacgtttttaccgtcgtcgcaagttctgccgctttacagctgagaatgttgcgtacatcgactacaaagatatcgacactttaaaacagtacatcactgaaaacggcaagattgttcctagccgtatcactggtactaaagctcgttatcaacgtcaattagcacttgctatcaaacaagctcgctatttgtctttgattccgtacactgacaaccataagtgaggtgatctgtggacgttatcttattaccaactataataggtagtggtttaatgaaaactctcagcgctaagccagctgaagttcaacatgactggtatgttgttgatgcttctggcaaaactttaggtcgccttgcgactgaaatcgctcgtcgtttacgcggtaagcataaaacttcttatactcctcacgttgacactggcgattacatcgttgtgattaatgctgaacaaattcaagtgactggtaacaaatcacttgataagaaatattatcgccatactggtttccctggtggtatccgtgagactaacttcgagaagttaattgctcacaaacctgaagctgttcttgaaaaagcggttaaaggcatgttaccaaaaggtcctcttggttatgcaatgatcaaaaaaatgaaagtgtacgctggtactgagcatcctcatgctgctcaacagccacaagttttggacatctaagggatacagcacatggctactaattatggtacaggtcgccgtaagaccgcaactgcacgtgttttcttgtcagctggtacaggtaaactcgttattaacaaccgtactttagagcaatatttcggtcgtgaaactgctcgtatggttgttcgtcaacctttagaacttttagaagttactgaaaagtttgacctttacatcactgttaaaggtggtggtatcggtggtcaagctggcgcgatccgtcacggtattactcgtgcgcttatcgctgctgacgaaactttaaaacctgttctacgtcaagctggtttcgttactcgtgatgctcgtgaagttgagcgtaagaaacttggtttacgtaaagctcgtaaacgtcctcaattctctaaacgttaattcgtttaccgaatcggacaaaaagttatccataatctagaggattttacatgccacaagttaagttgaaagaaggcgaaccagttgacgtagctatccgtcgtttcaaacgttcatgcgaaaaagctggtgttttagctgacgttcgtaagcgcgaattctacgaaaaaccaactcaagaacgtaagcgcaaaaaagctgctgcagttaaacgctaccaaaagaaattggctcgcgaatctgtacgtactactcgcctttactaattaatttgtgattgactgctaacattaacccaacttttaaggtaaagaaaatggcagattacaacgtaagcatgcgcgaccttcttcaagcaggtgcgcactttggtcaccaaactcgtttctggaacccaaaaatgcgtcaatacatttttggcgcgcgcaacaaaattcacatcatcaaccttgagcacactgttcctgcgttaaatgatgctttgaacttcgctaaccaattagcaagcaaaaagaacaaagttttgttcgttggtacaaaacgtgctgcttctaacatcatccgtgaacaagctcaacgcgctggtcaaccatatgtagaccaccgttggttaggtggtatgttgacgaactggaaaacacttcgccaatctatcaaccgtttaaaagatcttcaaactcaatctcaagacggtacttttgctaagcttactaaacgtgaagctttagaacgtactcgtgagatggaaaaacttgagcgctctttaggcggcgttaaaaacatgggtggtttacctgacgcattatttgtaatcgacgttgatcacgaagcgattgcaattaaagaagctaagaacttaggtattcctgttatcggtatcgttgatacaaactctaacccagataacgttgattacgttattcctggtaacgacgatgcgatccgtgcagtaactttatatgcttcagctatggctgatgcaattcttgctggtaaagaatacgctcaatctcaagcgaacgctcaagcaaaaggcgatgacgctgcgaaagacgcttctgaggcttaatgcgttttgacgcaggcttgtcattacttaattaacggcactcctcagccaagtcaaaagcctccggtcggaggcttttgactacatgcccatggcgtttacgccccgccctgccactcatcgcagtactgttgtaattcattaagcattctgccgacatggaagccatcacaaacggcatgatgaacctgaatcgccagcggcatcagcaccttgtcgccttgcgtataatatttgcccatagtgaaaacgggggcgaagaagttgtccatattggccacgtttaaatcaaaactggtgaaactcacccagggattggctgagacgaaaaacatattctcaataaaccctttagggaaataggccaggttttcaccgtaacacgccacatcttgcgaatatatgtgtagaaactgccggaaatcgtcgtggtattcactccagagcgatgaaaacgtttcagtttgctcatggaaaacggtgtaacaagggtgaacactatcccatatcaccagctcaccgtctttcattgccatacggaactccggatgagcattcatcaggcgggcaagaatgtgaataaaggccggataaaacttgtgcttatttttctttacggtctttaaaaaggccgtaatatccagctgaacggtctggttataggtacattgagcaactgactgaaatgcctcaaaatgttctttacgatgccattgggatatatcaacggtggtatatccagtgatttttttctccattttagcttccttagctcctgaaaatctcgataactcaaaaaatacgcccggtagtgatcttatttcattatggtgaaagttggaacctcttacgtgccaggccaaataggccgt

SEQ ID NO: 222 - DNA, 9135 bp, Artificial
  Synthetic
tcagatccttccgtatttagccagtatgttctctagtgtggttcgttgtttttgcgtgagccatgagaacgaaccattgagatcatgcttactttgcatgtcactcaaaaattttgcctcaaaactggtgagctgaatttttgcagttaaagcatcgtgtagtgtttttcttagtccgttacgtaggtaggaatctgatgtaatggttgttggtattttgtcaccattcatttttatctggttgttctcaagttcggttacgagatccatttgtctatctagttcaacttggaaaatcaacgtatcagtcgggcggcctcgcttatcaaccaccaatttcatattgctgtaagtgtttaaatctttacttattggtttcaaaacccattggttaagccttttaaactcatggtagttattttcaagcattaacatgaacttaaattcatcaaggctaatctctatatttgccttgtgagttttcttttgtgttagttcttttaataaccactcataaatcctcatagagtatttgttttcaaaagacttaacatgttccagattatattttatgaatttttttaactggaaaagataaggcaatatctcttcactaaaaactaattctaatttttcgcttgagaacttggcatagtttgtccactggaaaatcttaaagcctttaaccaaaggattcctgatttccacagttctcgtcatcagctctctggttgctttagctaatacaccataagcattttccctactgatgttcatcatctgagcgtattggttataagtgaacgataccgtccgttctttccttgtagggttttcaatcgtggggttgagtagtgccacacagcataaaattagcttggtttcatgctccgttaagtcatagcgactaatcgctagttcatttgctttgaaaacaactaattcagacatacatctcaattggtctaggtgattttaatcactataccaattgagatgggctagtcaatgataattactagtccttttcctttgagttgtgggtatctgtaaattctgctagacctttgctggaaaacttgtaaattctgctagaccctctgtaaattccgctagacctttgtgtgttttttttgtttatattcaagtggttataatttatagaataaagaaagaataaaaaaagataaaaagaatagatcccagccctgtgtataactcactactttagtcagttccgcagtattacaaaaggatgtcgcaaacgctgtttgctcctctacaaaacagaccttaaaaccctaaaggcttaagtagcaccctcgcaagctcgggcaaatcgctgaatattccttttgtctccgaccatcaggcacctgagtcgctgtctttttcgtgacattcagttcgctgcgctcacggctctggcagtgaatgggggtaaatggcactacaggcgccttttatggattcatgcaaggaaactacccataatacaagaaaagcccgtcacgggcttctcagggcgttttatggcgggtctgctatgtggtgctatctgactttttgctgttcagcagttcctgccctctgattttccagtctgaccacttcggattatcccgtgacaggtcattcagactggctaatgcacccagtaaggcagcggtatcatcaacaggcttacccgtcttactgtcaagaggacatccggtcaaataaaacgaaaggctcagtcgaaagactgggcctttcgttttgctgaggagacttagggaccctttatgacaacttgacggctacatcattcactttttcttcacaaccggcacggaactcgctcgggctggccccggtgcattttttaaatacccgcgagaaatagagttgatcgtcaaaaccaacattgcgaccgacggtggcgataggcatccgggtggtgctcaaaagcagcttcgcctggctgatacgttggtcctcgcgccagcttaagacgctaatccctaactgctggcggaaaagatgtgacagacgcgacggcgacaagcaaacatgctgtgcgacgctggcgatatcaaaattgctgtctgccaggtgatcgctgatgtactgacaagcctcgcgtacccgattatccatcggtggatggagcgactcgttaatcgcttccatgcgccgcagtaacaattgctcaagcagatttatcgccagcagctccgaatagcgcccttccccttgcccggcgttaatgatttgcccaaacaggtcgctgaaatgcggctggtgcgcttcatccgggcgaaagaaccccgtattggcaaatattgacggccagttaagccattcatgccagtaggcgcgcggacgaaagtaaacccactggtgataccattcgcgagcctccggatgacgaccgtagtgatgaatctctcctggcgggaacagcaaaatatcacccggtcggcaaacaaattctcgtccctgatttttcaccaccccctgaccgcgaatggtgagattgagaatataacctttcattcccagcggtcggtcgataaaaaaatcgagataaccgttggcctcaatcggcgttaaacccgccaccagatgggcattaaacgagtatcccggcagcaggggatcattttgcgcttcagccatacttttcatactcccaccattcagagaagaaaccaattgtccatattgcatcagacattgccgtcactgcgtcttttactggctcttctcgctaacccaaccggtaaccccgcttattaaaagcattctgtaacaaagcgggaccaaagccatgacaaaaacgcgtaacaaaagtgtctataatcacggcagaaaagtccacattgattatttgcacggcgtcacactttgctatgccatagcatttttatccataagattagcggatcctacctgacgctttttatcgcaactctctactgtttctccatacccgttttacctgcaggtgcagtgaccgctgactttatcaggtatatcatgaccgaatcttttgcagccctctttgaagaaagtgaattaaacctcaacgttgaaaagggtgcagtcatccaaggtgttgttgtaaacatcgatagcgactgggttactgttgacactggccttaaatcagaaggcattgttgaccgtgctgaatttttaaatgaacaacgtgaacttgaagttcaggttggtgacactgttgacgtagttgttgaagctcttgacaacggtatgggtcaaacagttttatcacgtgaaaaagctaaacgtgctgaaacttggactaaacttgaaaaaatctttgaagatggcgaaatcgttactggtgttatctctggtaaagttaaaggcggtttcactgttgacatcggtcctgttcgtgcgttcttaccaggttcattagttgacactcgtcctatccgtgacactactcaccttgaaggtaaagagttagagtttaaagtaatcaaacttgatgctaaacgtaacaacgttgttgtatctcgtcgtgctgttatggaagctgaatcttctgctgaccgtgaagcattacttgctcaacttgaagaaggtcaaacagttacaggtactatcaagaaccttactgattacggtgcattcgttgatcttggcggtattgatggtcttcttcatatcacagatatggcttggaagcgtatcaagcacccttcagaagttgttgaagttggtcaagaagttactgttaaagtacttaaatttgaccgtgaacgtaaccgcgtatctttaggccttaaacaattaggcgaagatccatggttagcgatcatgagccgttaccctaaaggttctatcgttaaagcacgtgttactaacttaactgactacggttgtttcgctgaaatcgctgaaggcgttgaaggtttagtacacgtttctgaaatggaccacactaacaaaaacatccacccatctaaagttgttcagatcggtgacgaagttgatgttatggttcttgaagttgacgaagaacgtcgtcgtatcagccttggtatcaaacaaactcgtgctaacccatgggaagagtttgctaagtctcatgagaaaggcgaaaaagtttcaggcacaatcaagtctatcactgactttggtatcttcattggtttaaatggcggtatcgacggtctagttcacttgtctgatatttcttggaacgaacaaggcgaagaagctatccgtcgttacaagaaaggtgacactgttgaagcagttatcttgtctgtagacgctgaaggtaaccgtatcagccttggtatcaagcaattgaacagcgatccgttcaatgatttcttagctgctaacgaacgtggtgctttagttaaaggtactgtgactgcagttgatgctcgtggcgcaactgttaagttagctgacgaagtagaagctactcttaaagcttctgaaatcaaccgtgaccgcgttgaagatgcaactaaattcttagaagttggtcaagaagttgaagctaaaatcatcaacgttgatcgtaaatctcgctctatcaacttgtctatcaaagcgaaagacgaagctgaagagaaagaagcagtagctaacttacgtacagcatcagcttctcaagaaaatggtcctaagactattggtgacttgatcaaagcgcaaatgaagtaataagttaacaaagtacagtttcatgtttttaagcatctcggagaaatcgaatggctttaactaatgcagaccgcgcagagatcattgctaaatttgctcgcgctgaaaacgacactggttcaccagaagtacaagtagctttattgactgctcaaatcaatgatttacaaggtcactttaaagctcacaaacacgaccaccatagccgtcgcggtttgatccgtatggttaaccaacgtcgtaaattacttgactacttaaatggtaaagaccacgagcgttacactgctttgatcggtgctttaggtctacgtcgttaattcgattttgctttgttttcggtttcaacttattttcaaggagtgcaagagtggcaaactctgctcaagctaaaaaacgtgcgcgccaaaacgttaaagcgcgtaaacacaacgcaagcttgcgttctatggttcgtacttacatcaaacgtactttaagtgcaatcgctggtggtgattatgctgttgctacagaagcttacaaaaaagctgttcctgtaatcgaccgcatggctgataaaggcatcatccacaaaaataaagctgctcgtcataagagccgtttaaatgctcaagttaaagctttagctaactaattgaagcatgtaaaaaaagcccgtaagaattataaggcttttatcatggttgttattcgtttagcacgtggcggcgcaaaaaaacgtccattctatcaaatcgttgtgactgatagccgcaatgcacgtgatggtcgtttcatcgagcgtatcggtttctttaacccaactgcacaaggtcaagcagaaaaacttcgtttagacgcagaccgttttgctcactgggtttctcaaggtgctcaaccttctgaacgtgttgcttctttggctgctcaagctaaaaaagctactgcataattattgtagtaggtagcccatgacactgtttaaaccgtaaggagctgacaatgcgtcattacgaaatcgtacttttggtacatccagaccaaagcgatcaagttgtaggtatggttgaacgctatatctctcagatcaaagaagctgatggtcaaattcaccgtttagaagattggggccgtcgtcaattggcttacccaattaacaaaattcacaaagcgcactacattcttatgaatgttgaatgtggtcaaactacgcttgatgagttagaagaattattccgttataacgacgcgatcattcgtaaccttatcatccgtcgtgaacacgcaatcactgaagagtcattgcttgctaagagtgctgaagaaaagcgtgcgcgtaaagctcaacgcgaagaagcacagcaagttgctcaagaagctgaataaggagaacatcaatggcacgtttttaccgtcgtcgcaagttctgccgctttacagctgagaatgttgcgtacatcgactacaaagatatcgacactttaaaacagtacatcactgaaaacggcaagattgttcctagccgtatcactggtactaaagctcgttatcaacgtcaattagcacttgctatcaaacaagctcgctatttgtctttgattccgtacactgacaaccataagtgaggtgatctgtggacgttatcttattacaacgcattaagaaccttggtaaattaggcgataaagtatcagttaaagctggttacggccgtaactttcttatccctcaaggtaaagcagttgcagctactgaagctaacactgctgcttttgaagctcgtcgtgctgaacttgagaagcaagaagctgaagtattagctgctgctcaagcacgtgctgaacaattgaatgaagttaacatcgttatcactgctaaagctggtgacgaaggtaaactcttcggttctatcggtactcgtgacatcgctgacgcgttaacgaatgctggtcttacagttgaccgtgcagaagttcgtttaccaaacggtgcgcttcgtcacactggtgaattcaacatcgcaatccaattgcatcatgatgttgttgcagaagttctcgttactatcgtatctgagtaatttctcatcaaaaaaagagcatgcttttggacatctaagggatacagcacatggctactaattatggtacaggtcgccgtaagaccgcaactgcacgtgttttcttgtcagctggtacaggtaaactcgttattaacaaccgtactttagagcaatatttcggtcgtgaaactgctcgtatggttgttcgtcaacctttagaacttttagaagttactgaaaagtttgacctttacatcactgttaaaggtggtggtatcggtggtcaagctggcgcgatccgtcacggtattactcgtgcgcttatcgctgctgacgaaactttaaaacctgttctacgtcaagctggtttcgttactcgtgatgctcgtgaagttgagcgtaagaaacttggtttacgtaaagctcgtaaacgtcctcaattctctaaacgttaattcgtttaccgaatcggacaaaaagttatccataatctagaggattttacatgccacaagttaagttgaaagaaggcgaaccagttgacgtagctatccgtcgtttcaaacgttcatgcgaaaaagctggtgttttagctgacgttcgtaagcgcgaattctacgaaaaaccaactcaagaacgtaagcgcaaaaaagctgctgcagttaaacgctaccaaaagaaattggctcgcgaatctgtacgtactactcgcctttactaattaatttgtgattgactgctaacattaacccaacttttaaggtaaagaaaatggcagattacaacgtaagcatgcgcgaccttcttcaagcaggtgcgcactttggtcaccaaactcgtttctggaacccaaaaatgcgtcaatacatttttggcgcgcgcaacaaaattcacatcatcaaccttgagcacactgttcctgcgttaaatgatgctttgaacttcgctaaccaattagcaagcaaaaagaacaaagttttgttcgttggtacaaaacgtgctgcttctaacatcatccgtgaacaagctcaacgcgctggtcaaccatatgtagaccaccgttggttaggtggtatgttgacgaactggaaaacacttcgccaatctatcaaccgtttaaaagatcttcaaactcaatctcaagacggtacttttgctaagcttactaaacgtgaagctttagaacgtactcgtgagatggaaaaacttgagcgctctttaggcggcgttaaaaacatgggtggtttacctgacgcattatttgtaatcgacgttgatcacgaagcgattgcaattaaagaagctaagaacttaggtattcctgttatcggtatcgttgatacaaactctaacccagataacgttgattacgttattcctggtaacgacgatgcgatccgtgcagtaactttatatgcttcagctatggctgatgcaattcttgctggtaaagaatacgctcaatctcaagcgaacgctcaagcaaaaggcgatgacgctgcgaaagacgcttctgaggcttaatgcgttttgacgcaggcttgtcattacttaattaacggcactcctcagccaagtcaaaagcctccggtcggaggcttttgactacatgcccatggcgtttacgccccgccctgccactcatcgcagtactgttgtaattcattaagcattctgccgacatggaagccatcacaaacggcatgatgaacctgaatcgccagcggcatcagcaccttgtcgccttgcgtataatatttgcccatagtgaaaacgggggcgaagaagttgtccatattggccacgtttaaatcaaaactggtgaaactcacccagggattggctgagacgaaaaacatattctcaataaaccctttagggaaataggccaggttttcaccgtaacacgccacatcttgcgaatatatgtgtagaaactgccggaaatcgtcgtggtattcactccagagcgatgaaaacgtttcagtttgctcatggaaaacggtgtaacaagggtgaacactatcccatatcaccagctcaccgtctttcattgccatacggaactccggatgagcattcatcaggcgggcaagaatgtgaataaaggccggataaaacttgtgcttatttttctttacggtctttaaaaaggccgtaatatccagctgaacggtctggttataggtacattgagcaactgactgaaatgcctcaaaatgttctttacgatgccattgggatatatcaacggtggtatatccagtgatttttttctccattttagcttccttagctcctgaaaatctcgataactcaaaaaatacgcccggtagtgatcttatttcattatggtgaaagttggaacctcttacgtgccaggccaaataggccgt

SEQ ID NO: 223 - DNA, 9177 bp, Artificial
  Synthetic
tcagatccttccgtatttagccagtatgttctctagtgtggttcgttgtttttgcgtgagccatgagaacgaaccattgagatcatgcttactttgcatgtcactcaaaaattttgcctcaaaactggtgagctgaatttttgcagttaaagcatcgtgtagtgtttttcttagtccgttacgtaggtaggaatctgatgtaatggttgttggtattttgtcaccattcatttttatctggttgttctcaagttcggttacgagatccatttgtctatctagttcaacttggaaaatcaacgtatcagtcgggcggcctcgcttatcaaccaccaatttcatattgctgtaagtgtttaaatctttacttattggtttcaaaacccattggttaagccttttaaactcatggtagttattttcaagcattaacatgaacttaaattcatcaaggctaatctctatatttgccttgtgagttttcttttgtgttagttcttttaataaccactcataaatcctcatagagtatttgttttcaaaagacttaacatgttccagattatattttatgaatttttttaactggaaaagataaggcaatatctcttcactaaaaactaattctaatttttcgcttgagaacttggcatagtttgtccactggaaaatcttaaagcctttaaccaaaggattcctgatttccacagttctcgtcatcagctctctggttgctttagctaatacaccataagcattttccctactgatgttcatcatctgagcgtattggttataagtgaacgataccgtccgttctttccttgtagggttttcaatcgtggggttgagtagtgccacacagcataaaattagcttggtttcatgctccgttaagtcatagcgactaatcgctagttcatttgctttgaaaacaactaattcagacatacatctcaattggtctaggtgattttaatcactataccaattgagatgggctagtcaatgataattactagtccttttcctttgagttgtgggtatctgtaaattctgctagacctttgctggaaaacttgtaaattctgctagaccctctgtaaattccgctagacctttgtgtgttttttttgtttatattcaagtggttataatttatagaataaagaaagaataaaaaaagataaaaagaatagatcccagccctgtgtataactcactactttagtcagttccgcagtattacaaaaggatgtcgcaaacgctgtttgctcctctacaaaacagaccttaaaaccctaaaggcttaagtagcaccctcgcaagctcgggcaaatcgctgaatattccttttgtctccgaccatcaggcacctgagtcgctgtctttttcgtgacattcagttcgctgcgctcacggctctggcagtgaatgggggtaaatggcactacaggcgccttttatggattcatgcaaggaaactacccataatacaagaaaagcccgtcacgggcttctcagggcgttttatggcgggtctgctatgtggtgctatctgactttttgctgttcagcagttcctgccctctgattttccagtctgaccacttcggattatcccgtgacaggtcattcagactggctaatgcacccagtaaggcagcggtatcatcaacaggcttacccgtcttactgtcaagaggacatccggtcaaataaaacgaaaggctcagtcgaaagactgggcctttcgttttgctgaggagacttagggaccctttatgacaacttgacggctacatcattcactttttcttcacaaccggcacggaactcgctcgggctggccccggtgcattttttaaatacccgcgagaaatagagttgatcgtcaaaaccaacattgcgaccgacggtggcgataggcatccgggtggtgctcaaaagcagcttcgcctggctgatacgttggtcctcgcgccagcttaagacgctaatccctaactgctggcggaaaagatgtgacagacgcgacggcgacaagcaaacatgctgtgcgacgctggcgatatcaaaattgctgtctgccaggtgatcgctgatgtactgacaagcctcgcgtacccgattatccatcggtggatggagcgactcgttaatcgcttccatgcgccgcagtaacaattgctcaagcagatttatcgccagcagctccgaatagcgcccttccccttgcccggcgttaatgatttgcccaaacaggtcgctgaaatgcggctggtgcgcttcatccgggcgaaagaaccccgtattggcaaatattgacggccagttaagccattcatgccagtaggcgcgcggacgaaagtaaacccactggtgataccattcgcgagcctccggatgacgaccgtagtgatgaatctctcctggcgggaacagcaaaatatcacccggtcggcaaacaaattctcgtccctgatttttcaccaccccctgaccgcgaatggtgagattgagaatataacctttcattcccagcggtcggtcgataaaaaaatcgagataaccgttggcctcaatcggcgttaaacccgccaccagatgggcattaaacgagtatcccggcagcaggggatcattttgcgcttcagccatacttttcatactcccaccattcagagaagaaaccaattgtccatattgcatcagacattgccgtcactgcgtcttttactggctcttctcgctaacccaaccggtaaccccgcttattaaaagcattctgtaacaaagcgggaccaaagccatgacaaaaacgcgtaacaaaagtgtctataatcacggcagaaaagtccacattgattatttgcacggcgtcacactttgctatgccatagcatttttatccataagattagcggatcctacctgacgctttttatcgcaactctctactgtttctccatacccgttttacctgcaggtgcagtgaccgctgactttatcaggtatatcatgaccgaatcttttgcagccctctttgaagaaagtgaattaaacctcaacgttgaaaagggtgcagtcatccaaggtgttgttgtaaacatcgatagcgactgggttactgttgacactggccttaaatcagaaggcattgttgaccgtgctgaatttttaaatgaacaacgtgaacttgaagttcaggttggtgacactgttgacgtagttgttgaagctcttgacaacggtatgggtcaaacagttttatcacgtgaaaaagctaaacgtgctgaaacttggactaaacttgaaaaaatctttgaagatggcgaaatcgttactggtgttatctctggtaaagttaaaggcggtttcactgttgacatcggtcctgttcgtgcgttcttaccaggttcattagttgacactcgtcctatccgtgacactactcaccttgaaggtaaagagttagagtttaaagtaatcaaacttgatgctaaacgtaacaacgttgttgtatctcgtcgtgctgttatggaagctgaatcttctgctgaccgtgaagcattacttgctcaacttgaagaaggtcaaacagttacaggtactatcaagaaccttactgattacggtgcattcgttgatcttggcggtattgatggtcttcttcatatcacagatatggcttggaagcgtatcaagcacccttcagaagttgttgaagttggtcaagaagttactgttaaagtacttaaatttgaccgtgaacgtaaccgcgtatctttaggccttaaacaattaggcgaagatccatggttagcgatcatgagccgttaccctaaaggttctatcgttaaagcacgtgttactaacttaactgactacggttgtttcgctgaaatcgctgaaggcgttgaaggtttagtacacgtttctgaaatggaccacactaacaaaaacatccacccatctaaagttgttcagatcggtgacgaagttgatgttatggttcttgaagttgacgaagaacgtcgtcgtatcagccttggtatcaaacaaactcgtgctaacccatgggaagagtttgctaagtctcatgagaaaggcgaaaaagtttcaggcacaatcaagtctatcactgactttggtatcttcattggtttaaatggcggtatcgacggtctagttcacttgtctgatatttcttggaacgaacaaggcgaagaagctatccgtcgttacaagaaaggtgacactgttgaagcagttatcttgtctgtagacgctgaaggtaaccgtatcagccttggtatcaagcaattgaacagcgatccgttcaatgatttcttagctgctaacgaacgtggtgctttagttaaaggtactgtgactgcagttgatgctcgtggcgcaactgttaagttagctgacgaagtagaagctactcttaaagcttctgaaatcaaccgtgaccgcgttgaagatgcaactaaattcttagaagttggtcaagaagttgaagctaaaatcatcaacgttgatcgtaaatctcgctctatcaacttgtctatcaaagcgaaagacgaagctgaagagaaagaagcagtagctaacttacgtacagcatcagcttctcaagaaaatggtcctaagactattggtgacttgatcaaagcgcaaatgaagtaataagttaacaaagtacagtttcatgtttttaagcatctcggagaaatcgaatggctttaactaatgcagaccgcgcagagatcattgctaaatttgctcgcgctgaaaacgacactggttcaccagaagtacaagtagctttattgactgctcaaatcaatgatttacaaggtcactttaaagctcacaaacacgaccaccatagccgtcgcggtttgatccgtatggttaaccaacgtcgtaaattacttgactacttaaatggtaaagaccacgagcgttacactgctttgatcggtgctttaggtctacgtcgttaattcgattttgctttgttttcggtttcaacttattttcaaggagtgcaagagtggcaaactctgctcaagctaaaaaacgtgcgcgccaaaacgttaaagcgcgtaaacacaacgcaagcttgcgttctatggttcgtacttacatcaaacgtactttaagtgcaatcgctggtggtgattatgctgttgctacagaagcttacaaaaaagctgttcctgtaatcgaccgcatggctgataaaggcatcatccacaaaaataaagctgctcgtcataagagccgtttaaatgctcaagttaaagctttagctaactaattgaagcatgtaaaaaaagcccgtaagaattataaggcttttatcatggttgttattcgtttagcacgtggcggcgcaaaaaaacgtccattctatcaaatcgttgtgactgatagccgcaatgcacgtgatggtcgtttcatcgagcgtatcggtttctttaacccaactgcacaaggtcaagcagaaaaacttcgtttagacgcagaccgttttgctcactgggtttctcaaggtgctcaaccttctgaacgtgttgcttctttggctgctcaagctaaaaaagctactgcataattattgtagtaggtagcccatgacactgtttaaaccgtaaggagctgacaatgcgtcattacgaaatcgtacttttggtacatccagaccaaagcgatcaagttgtaggtatggttgaacgctatatctctcagatcaaagaagctgatggtcaaattcaccgtttagaagattggggccgtcgtcaattggcttacccaattaacaaaattcacaaagcgcactacattcttatgaatgttgaatgtggtcaaactacgcttgatgagttagaagaattattccgttataacgacgcgatcattcgtaaccttatcatccgtcgtgaacacgcaatcactgaagagtcattgcttgctaagagtgctgaagaaaagcgtgcgcgtaaagctcaacgcgaagaagcacagcaagttgctcaagaagctgaataaggagaacatcaatggcacgtttttaccgtcgtcgcaagttctgccgctttacagctgagaatgttgcgtacatcgactacaaagatatcgacactttaaaacagtacatcactgaaaacggcaagattgttcctagccgtatcactggtactaaagctcgttatcaacgtcaattagcacttgctatcaaacaagctcgctatttgtctttgattccgtacactgacaaccataagtgaggtgatctgtggacgttatcttattacaacgcattaagaaccttggtaaattaggcgataaagtatcagttaaagctggttacggccgtaactttcttatccctcaaggtaaagcagttgcagctactgaagctaacactgctgcttttgaagctcgtcgtgctgaacttgagaagcaagaagctgaagtattagctgctgctcaagcacgtgctgaacaattgaatgaagttaacatcgttatcactgctaaagctggtgacgaaggtaaactcttcggttctatcggtactcgtgacatcgctgacgcgttaacgaatgctggtcttacagttgaccgtgcagaagttcgtttaccaaacggtgcgcttcgtcacactggtgaattcaacatcgcaatccaattgcatcatgatgttgttgcagaagttctcgttactatcgtatctgagtaatttctcatcaaaaaaagagcatgctaccaactataataggtagtggtttaatgaaaactctcagcgctaagccagctgaagttcaacatgactggtatgttgttgatgcttctggcaaaactttaggtcgccttgcgactgaaatcgctcgtcgtttacgcggtaagcataaaacttcttatactcctcacgttgacactggcgattacatcgttgtgattaatgctgaacaaattcaagtgactggtaacaaatcacttgataagaaatattatcgccatactggtttccctggtggtatccgtgagactaacttcgagaagttaattgctcacaaacctgaagctgttcttgaaaaagcggttaaaggcatgttaccaaaaggtcctcttggttatgcaatgatcaaaaaaatgaaagtgtacgctggtactgagcatcctcatgctgctcaacagccacaagttttggacatctaagggatacagcacatggctactaattttatccataatctagaggattttacatgccacaagttaagttgaaagaaggcgaaccagttgacgtagctatccgtcgtttcaaacgttcatgcgaaaaagctggtgttttagctgacgttcgtaagcgcgaattctacgaaaaaccaactcaagaacgtaagcgcaaaaaagctgctgcagttaaacgctaccaaaagaaattggctcgcgaatctgtacgtactactcgcctttactaattaatttgtgattgactgctaacattaacccaacttttaaggtaaagaaaatggcagattacaacgtaagcatgcgcgaccttcttcaagcaggtgcgcactttggtcaccaaactcgtttctggaacccaaaaatgcgtcaatacatttttggcgcgcgcaacaaaattcacatcatcaaccttgagcacactgttcctgcgttaaatgatgctttgaacttcgctaaccaattagcaagcaaaaagaacaaagttttgttcgttggtacaaaacgtgctgcttctaacatcatccgtgaacaagctcaacgcgctggtcaaccatatgtagaccaccgttggttaggtggtatgttgacgaactggaaaacacttcgccaatctatcaaccgtttaaaagatcttcaaactcaatctcaagacggtacttttgctaagcttactaaacgtgaagctttagaacgtactcgtgagatggaaaaacttgagcgctctttaggcggcgttaaaaacatgggtggtttacctgacgcattatttgtaatcgacgttgatcacgaagcgattgcaattaaagaagctaagaacttaggtattcctgttatcggtatcgttgatacaaactctaacccagataacgttgattacgttattcctggtaacgacgatgcgatccgtgcagtaactttatatgcttcagctatggctgatgcaattcttgctggtaaagaatacgctcaatctcaagcgaacgctcaagcaaaaggcgatgacgctgcgaaagacgcttctgaggcttaatgcgttttgacgcaggcttgtcattacttaattaacggcactcctcagccaagtcaaaagcctccggtcggaggcttttgactacatgcccatggcgtttacgccccgccctgccactcatcgcagtactgttgtaattcattaagcattctgccgacatggaagccatcacaaacggcatgatgaacctgaatcgccagcggcatcagcaccttgtcgccttgcgtataatatttgcccatagtgaaaacgggggcgaagaagttgtccatattggccacgtttaaatcaaaactggtgaaactcacccagggattggctgagacgaaaaacatattctcaataaaccctttagggaaataggccaggttttcaccgtaacacgccacatcttgcgaatatatgtgtagaaactgccggaaatcgtcgtggtattcactccagagcgatgaaaacgtttcagtttgctcatggaaaacggtgtaacaagggtgaacactatcccatatcaccagctcaccgtctttcattgccatacggaactccggatgagcattcatcaggcgggcaagaatgtgaataaaggccggataaaacttgtgcttatttttctttacggtctttaaaaaggccgtaatatccagctgaacggtctggttataggtacattgagcaactgactgaaatgcctcaaaatgttctttacgatgccattgggatatatcaacggtggtatatccagtgatttttttctccattttagcttccttagctcctgaaaatctcgataactcaaaaaatacgcccggtagtgatcttatttcattatggtgaaagttggaacctcttacgtgccaggccaaataggccgt

SEQ ID NO: 224 - DNA, 9310 bp, Artificial
  Synthetic
tcagatccttccgtatttagccagtatgttctctagtgtggttcgttgtttttgcgtgagccatgagaacgaaccattgagatcatgcttactttgcatgtcactcaaaaattttgcctcaaaactggtgagctgaatttttgcagttaaagcatcgtgtagtgtttttcttagtccgttacgtaggtaggaatctgatgtaatggttgttggtattttgtcaccattcatttttatctggttgttctcaagttcggttacgagatccatttgtctatctagttcaacttggaaaatcaacgtatcagtcgggcggcctcgcttatcaaccaccaatttcatattgctgtaagtgtttaaatctttacttattggtttcaaaacccattggttaagccttttaaactcatggtagttattttcaagcattaacatgaacttaaattcatcaaggctaatctctatatttgccttgtgagttttcttttgtgttagttcttttaataaccactcataaatcctcatagagtatttgttttcaaaagacttaacatgttccagattatattttatgaatttttttaactggaaaagataaggcaatatctcttcactaaaaactaattctaatttttcgcttgagaacttggcatagtttgtccactggaaaatcttaaagcctttaaccaaaggattcctgatttccacagttctcgtcatcagctctctggttgctttagctaatacaccataagcattttccctactgatgttcatcatctgagcgtattggttataagtgaacgataccgtccgttctttccttgtagggttttcaatcgtggggttgagtagtgccacacagcataaaattagcttggtttcatgctccgttaagtcatagcgactaatcgctagttcatttgctttgaaaacaactaattcagacatacatctcaattggtctaggtgattttaatcactataccaattgagatgggctagtcaatgataattactagtccttttcctttgagttgtgggtatctgtaaattctgctagacctttgctggaaaacttgtaaattctgctagaccctctgtaaattccgctagacctttgtgtgttttttttgtttatattcaagtggttataatttatagaataaagaaagaataaaaaaagataaaaagaatagatcccagccctgtgtataactcactactttagtcagttccgcagtattacaaaaggatgtcgcaaacgctgtttgctcctctacaaaacagaccttaaaaccctaaaggcttaagtagcaccctcgcaagctcgggcaaatcgctgaatattccttttgtctccgaccatcaggcacctgagtcgctgtctttttcgtgacattcagttcgctgcgctcacggctctggcagtgaatgggggtaaatggcactacaggcgccttttatggattcatgcaaggaaactacccataatacaagaaaagcccgtcacgggcttctcagggcgttttatggcgggtctgctatgtggtgctatctgactttttgctgttcagcagttcctgccctctgattttccagtctgaccacttcggattatcccgtgacaggtcattcagactggctaatgcacccagtaaggcagcggtatcatcaacaggcttacccgtcttactgtcaagaggacatccggtcaaataaaacgaaaggctcagtcgaaagactgggcctttcgttttgctgaggagacttagggaccctttatgacaacttgacggctacatcattcactttttcttcacaaccggcacggaactcgctcgggctggccccggtgcattttttaaatacccgcgagaaatagagttgatcgtcaaaaccaacattgcgaccgacggtggcgataggcatccgggtggtgctcaaaagcagcttcgcctggctgatacgttggtcctcgcgccagcttaagacgctaatccctaactgctggcggaaaagatgtgacagacgcgacggcgacaagcaaacatgctgtgcgacgctggcgatatcaaaattgctgtctgccaggtgatcgctgatgtactgacaagcctcgcgtacccgattatccatcggtggatggagcgactcgttaatcgcttccatgcgccgcagtaacaattgctcaagcagatttatcgccagcagctccgaatagcgcccttccccttgcccggcgttaatgatttgcccaaacaggtcgctgaaatgcggctggtgcgcttcatccgggcgaaagaaccccgtattggcaaatattgacggccagttaagccattcatgccagtaggcgcgcggacgaaagtaaacccactggtgataccattcgcgagcctccggatgacgaccgtagtgatgaatctctcctggcgggaacagcaaaatatcacccggtcggcaaacaaattctcgtccctgatttttcaccaccccctgaccgcgaatggtgagattgagaatataacctttcattcccagcggtcggtcgataaaaaaatcgagataaccgttggcctcaatcggcgttaaacccgccaccagatgggcattaaacgagtatcccggcagcaggggatcattttgcgcttcagccatacttttcatactcccaccattcagagaagaaaccaattgtccatattgcatcagacattgccgtcactgcgtcttttactggctcttctcgctaacccaaccggtaaccccgcttattaaaagcattctgtaacaaagcgggaccaaagccatgacaaaaacgcgtaacaaaagtgtctataatcacggcagaaaagtccacattgattatttgcacggcgtcacactttgctatgccatagcatttttatccataagattagcggatcctacctgacgctttttatcgcaactctctactgtttctccatacccgttttacctgcaggtgcagtgaccgctgactttatcaggtatatcatgaccgaatcttttgcagccctctttgaagaaagtgaattaaacctcaacgttgaaaagggtgcagtcatccaaggtgttgttgtaaacatcgatagcgactgggttactgttgacactggccttaaatcagaaggcattgttgaccgtgctgaatttttaaatgaacaacgtgaacttgaagttcaggttggtgacactgttgacgtagttgttgaagctcttgacaacggtatgggtcaaacagttttatcacgtgaaaaagctaaacgtgctgaaacttggactaaacttgaaaaaatctttgaagatggcgaaatcgttactggtgttatctctggtaaagttaaaggcggtttcactgttgacatcggtcctgttcgtgcgttcttaccaggttcattagttgacactcgtcctatccgtgacactactcaccttgaaggtaaagagttagagtttaaagtaatcaaacttgatgctaaacgtaacaacgttgttgtatctcgtcgtgctgttatggaagctgaatcttctgctgaccgtgaagcattacttgctcaacttgaagaaggtcaaacagttacaggtactatcaagaaccttactgattacggtgcattcgttgatcttggcggtattgatggtcttcttcatatcacagatatggcttggaagcgtatcaagcacccttcagaagttgttgaagttggtcaagaagttactgttaaagtacttaaatttgaccgtgaacgtaaccgcgtatctttaggccttaaacaattaggcgaagatccatggttagcgatcatgagccgttaccctaaaggttctatcgttaaagcacgtgttactaacttaactgactacggttgtttcgctgaaatcgctgaaggcgttgaaggtttagtacacgtttctgaaatggaccacactaacaaaaacatccacccatctaaagttgttcagatcggtgacgaagttgatgttatggttcttgaagttgacgaagaacgtcgtcgtatcagccttggtatcaaacaaactcgtgctaacccatgggaagagtttgctaagtctcatgagaaaggcgaaaaagtttcaggcacaatcaagtctatcactgactttggtatcttcattggtttaaatggcggtatcgacggtctagttcacttgtctgatatttcttggaacgaacaaggcgaagaagctatccgtcgttacaagaaaggtgacactgttgaagcagttatcttgtctgtagacgctgaaggtaaccgtatcagccttggtatcaagcaattgaacagcgatccgttcaatgatttcttagctgctaacgaacgtggtgctttagttaaaggtactgtgactgcagttgatgctcgtggcgcaactgttaagttagctgacgaagtagaagctactcttaaagcttctgaaatcaaccgtgaccgcgttgaagatgcaactaaattcttagaagttggtcaagaagttgaagctaaaatcatcaacgttgatcgtaaatctcgctctatcaacttgtctatcaaagcgaaagacgaagctgaagagaaagaagcagtagctaacttacgtacagcatcagcttctcaagaaaatggtcctaagactattggtgacttgatcaaagcgcaaatgaagtaataagttaacaaagtacagtttcatgtttttaagcatctcggagaaatcgaatggctttaactaatgcagaccgcgcagagatcattgctaaatttgctcgcgctgaaaacgacactggttcaccagaagtacaagtagctttattgactgctcaaatcaatgatttacaaggtcactttaaagctcacaaacacgaccaccatagccgtcgcggtttgatccgtatggttaaccaacgtcgtaaattacttgactacttaaatggtaaagaccacgagcgttacactgctttgatcggtgctttaggtctacgtcgttaattcgattttgctttgttttcggtttcaacttattttcaaggagtgcaagagtggcaaactctgctcaagctaaaaaacgtgcgcgccaaaacgttaaagcgcgtaaacacaacgcaagcttgcgttctatggttcgtacttacatcaaacgtactttaagtgcaatcgctggtggtgattatgctgttgctacagaagcttacaaaaaagctgttcctgtaatcgaccgcatggctgataaaggcatcatccacaaaaataaagctgctcgtcataagagccgtttaaatgctcaagttaaagctttagctaactaattgaagcatgtaaaaaaagcccgtaagaattataaggcttttatcatggttgttattcgtttagcacgtggcggcgcaaaaaaacgtccattctatcaaatcgttgtgactgatagccgcaatgcacgtgatggtcgtttcatcgagcgtatcggtttctttaacccaactgcacaaggtcaagcagaaaaacttcgtttagacgcagaccgttttgctcactgggtttctcaaggtgctcaaccttctgaacgtgttgcttctttggctgctcaagctaaaaaagctactgcataattattgtagtaggtagcccatgacactgtttaaaccgtaaggagctgacaatgcgtcattacgaaatcgtacttttggtacatccagaccaaagcgatcaagttgtaggtatggttgaacgctatatctctcagatcaaagaagctgatggtcaaattcaccgtttagaagattggggccgtcgtcaattggcttacccaattaacaaaattcacaaagcgcactacattcttatgaatgttgaatgtggtcaaactacgcttgatgagttagaagaattattccgttataacgacgcgatcattcgtaaccttatcatccgtcgtgaacacgcaatcactgaagagtcattgcttgctaagagtgctgaagaaaagcgtgcgcgtaaagctcaacgcgaagaagcacagcaagttgctcaagaagctgaataaggagaacatcaatggcacgtttttaccgtcgtcgcaagttctgccgctttacagctgagaatgttgcgtacatcgactacaaagatatcgacactttaaaacagtacatcactgaaaacggcaagattgttcctagccgtatcactggtactaaagctcgttatcaacgtcaattagcacttgctatcaaacaagctcgctatttgtctttgattccgtacactgacaaccataagtgaggtgatctgtggacgttatcttattacaacgcattaagaaccttggtaaattaggcgataaagtatcagttaaagctggttacggccgtaactttcttatccctcaaggtaaagcagttgcagctactgaagctaacactgctgcttttgaagctcgtcgtgctgaacttgagaagcaagaagctgaagtattagctgctgctcaagcacgtgctgaacaattgaatgaagttaacatcgttatcactgctaaagctggtgacgaaggtaaactcttcggttctatcggtactcgtgacatcgctgacgcgttaacgaatgctggtcttacagttgaccgtgcagaagttcgtttaccaaacggtgcgcttcgtcacactggtgaattcaacatcgcaatccaattgcatcatgatgttgttgcagaagttctcgttactatcgtatctgagtaatttctcatcaaaaaaagagcatgctaccaactataataggtagtggtttaatgaaaactctcagcgctaagccagctgaagttcaacatgactggtatgttgttgatgcttctggcaaaactttaggtcgccttgcgactgaaatcgctcgtcgtttacgcggtaagcataaaacttcttatactcctcacgttgacactggcgattacatcgttgtgattaatgctgaacaaattcaagtgactggtaacaaatcacttgataagaaatattatcgccatactggtttccctggtggtatccgtgagactaacttcgagaagttaattgctcacaaacctgaagctgttcttgaaaaagcggttaaaggcatgttaccaaaaggtcctcttggttatgcaatgatcaaaaaaatgaaagtgtacgctggtactgagcatcctcatgctgctcaacagccacaagttttggacatctaagggatacagcacatggctactaattatggtacaggtcgccgtaagaccgcaactgcacgtgttttcttgtcagctggtacaggtaaactcgttattaacaaccgtactttagagcaatatttcggtcgtgaaactgctcgtatggttgttcgtcaacctttagaacttttagaagttactgaaaagtttgacctttacatcactgttaaaggtggtggtatcggtggtcaagctggcgcgatccgtcacggtattactcgtgcgcttatcgctgctgacgaaactttaaaacctgttctacgtcaagctggtttcgttactcgtgatgctcgtgaagttgagcgtaagaaacttggtttacgtaaagctcgtaaacgtcctcaattctctaaacgttaattcgtttaccgaatcggacaaaaagtaacccaacttttaaggtaaagaaaatggcagattacaacgtaagcatgcgcgaccttcttcaagcaggtgcgcactttggtcaccaaactcgtttctggaacccaaaaatgcgtcaatacatttttggcgcgcgcaacaaaattcacatcatcaaccttgagcacactgttcctgcgttaaatgatgctttgaacttcgctaaccaattagcaagcaaaaagaacaaagttttgttcgttggtacaaaacgtgctgcttctaacatcatccgtgaacaagctcaacgcgctggtcaaccatatgtagaccaccgttggttaggtggtatgttgacgaactggaaaacacttcgccaatctatcaaccgtttaaaagatcttcaaactcaatctcaagacggtacttttgctaagcttactaaacgtgaagctttagaacgtactcgtgagatggaaaaacttgagcgctctttaggcggcgttaaaaacatgggtggtttacctgacgcattatttgtaatcgacgttgatcacgaagcgattgcaattaaagaagctaagaacttaggtattcctgttatcggtatcgttgatacaaactctaacccagataacgttgattacgttattcctggtaacgacgatgcgatccgtgcagtaactttatatgcttcagctatggctgatgcaattcttgctggtaaagaatacgctcaatctcaagcgaacgctcaagcaaaaggcgatgacgctgcgaaagacgcttctgaggcttaatgcgttttgacgcaggcttgtcattacttaattaacggcactcctcagccaagtcaaaagcctccggtcggaggcttttgactacatgcccatggcgtttacgccccgccctgccactcatcgcagtactgttgtaattcattaagcattctgccgacatggaagccatcacaaacggcatgatgaacctgaatcgccagcggcatcagcaccttgtcgccttgcgtataatatttgcccatagtgaaaacgggggcgaagaagttgtccatattggccacgtttaaatcaaaactggtgaaactcacccagggattggctgagacgaaaaacatattctcaataaaccctttagggaaataggccaggttttcaccgtaacacgccacatcttgcgaatatatgtgtagaaactgccggaaatcgtcgtggtattcactccagagcgatgaaaacgtttcagtttgctcatggaaaacggtgtaacaagggtgaacactatcccatatcaccagctcaccgtctttcattgccatacggaactccggatgagcattcatcaggcgggcaagaatgtgaataaaggccggataaaacttgtgcttatttttctttacggtctttaaaaaggccgtaatatccagctgaacggtctggttataggtacattgagcaactgactgaaatgcctcaaaatgttctttacgatgccattgggatatatcaacggtggtatatccagtgatttttttctccattttagcttccttagctcctgaaaatctcgataactcaaaaaatacgcccggtagtgatcttatttcattatggtgaaagttggaacctcttacgtgccaagccaaataggccgt

SEQ ID NO: 225 - DNA, 8773 bp, Artificial
  Synthetic
tcagatccttccgtatttagccagtatgttctctagtgtggttcgttgtttttgcgtgagccatgagaacgaaccattgagatcatgcttactttgcatgtcactcaaaaattttgcctcaaaactggtgagctgaatttttgcagttaaagcatcgtgtagtgtttttcttagtccgttacgtaggtaggaatctgatgtaatggttgttggtattttgtcaccattcatttttatctggttgttctcaagttcggttacgagatccatttgtctatctagttcaacttggaaaatcaacgtatcagtcgggcggcctcgcttatcaaccaccaatttcatattgctgtaagtgtttaaatctttacttattggtttcaaaacccattggttaagccttttaaactcatggtagttattttcaagcattaacatgaacttaaattcatcaaggctaatctctatatttgccttgtgagttttcttttgtgttagttcttttaataaccactcataaatcctcatagagtatttgttttcaaaagacttaacatgttccagattatattttatgaatttttttaactggaaaagataaggcaatatctcttcactaaaaactaattctaatttttcgcttgagaacttggcatagtttgtccactggaaaatcttaaagcctttaaccaaaggattcctgatttccacagttctcgtcatcagctctctggttgctttagctaatacaccataagcattttccctactgatgttcatcatctgagcgtattggttataagtgaacgataccgtccgttctttccttgtagggttttcaatcgtggggttgagtagtgccacacagcataaaattagcttggtttcatgctccgttaagtcatagcgactaatcgctagttcatttgctttgaaaacaactaattcagacatacatctcaattggtctaggtgattttaatcactataccaattgagatgggctagtcaatgataattactagtccttttcctttgagttgtgggtatctgtaaattctgctagacctttgctggaaaacttgtaaattctgctagaccctctgtaaattccgctagacctttgtgtgttttttttgtttatattcaagtggttataatttatagaataaagaaagaataaaaaaagataaaaagaatagatcccagccctgtgtataactcactactttagtcagttccgcagtattacaaaaggatgtcgcaaacgctgtttgctcctctacaaaacagaccttaaaaccctaaaggcttaagtagcaccctcgcaagctcgggcaaatcgctgaatattccttttgtctccgaccatcaggcacctgagtcgctgtctttttcgtgacattcagttcgctgcgctcacggctctggcagtgaatgggggtaaatggcactacaggcgccttttatggattcatgcaaggaaactacccataatacaagaaaagcccgtcacgggcttctcagggcgttttatggcgggtctgctatgtggtgctatctgactttttgctgttcagcagttcctgccctctgattttccagtctgaccacttcggattatcccgtgacaggtcattcagactggctaatgcacccagtaaggcagcggtatcatcaacaggcttacccgtcttactgtcaagaggacatccggtcaaataaaacgaaaggctcagtcgaaagactgggcctttcgttttgctgaggagacttagggaccctttatgacaacttgacggctacatcattcactttttcttcacaaccggcacggaactcgctcgggctggccccggtgcattttttaaatacccgcgagaaatagagttgatcgtcaaaaccaacattgcgaccgacggtggcgataggcatccgggtggtgctcaaaagcagcttcgcctggctgatacgttggtcctcgcgccagcttaagacgctaatccctaactgctggcggaaaagatgtgacagacgcgacggcgacaagcaaacatgctgtgcgacgctggcgatatcaaaattgctgtctgccaggtgatcgctgatgtactgacaagcctcgcgtacccgattatccatcggtggatggagcgactcgttaatcgcttccatgcgccgcagtaacaattgctcaagcagatttatcgccagcagctccgaatagcgcccttccccttgcccggcgttaatgatttgcccaaacaggtcgctgaaatgcggctggtgcgcttcatccgggcgaaagaaccccgtattggcaaatattgacggccagttaagccattcatgccagtaggcgcgcggacgaaagtaaacccactggtgataccattcgcgagcctccggatgacgaccgtagtgatgaatctctcctggcgggaacagcaaaatatcacccggtcggcaaacaaattctcgtccctgatttttcaccaccccctgaccgcgaatggtgagattgagaatataacctttcattcccagcggtcggtcgataaaaaaatcgagataaccgttggcctcaatcggcgttaaacccgccaccagatgggcattaaacgagtatcccggcagcaggggatcattttgcgcttcagccatacttttcatactcccaccattcagagaagaaaccaattgtccatattgcatcagacattgccgtcactgcgtcttttactggctcttctcgctaacccaaccggtaaccccgcttattaaaagcattctgtaacaaagcgggaccaaagccatgacaaaaacgcgtaacaaaagtgtctataatcacggcagaaaagtccacattgattatttgcacggcgtcacactttgctatgccatagcatttttatccataagattagcggatcctacctgacgctttttatcgcaactctctactgtttctccatacccgttttacctgcaggtgcagtgaccgctgactttatcaggtatatcatgaccgaatcttttgcagccctctttgaagaaagtgaattaaacctcaacgttgaaaagggtgcagtcatccaaggtgttgttgtaaacatcgatagcgactgggttactgttgacactggccttaaatcagaaggcattgttgaccgtgctgaatttttaaatgaacaacgtgaacttgaagttcaggttggtgacactgttgacgtagttgttgaagctcttgacaacggtatgggtcaaacagttttatcacgtgaaaaagctaaacgtgctgaaacttggactaaacttgaaaaaatctttgaagatggcgaaatcgttactggtgttatctctggtaaagttaaaggcggtttcactgttgacatcggtcctgttcgtgcgttcttaccaggttcattagttgacactcgtcctatccgtgacactactcaccttgaaggtaaagagttagagtttaaagtaatcaaacttgatgctaaacgtaacaacgttgttgtatctcgtcgtgctgttatggaagctgaatcttctgctgaccgtgaagcattacttgctcaacttgaagaaggtcaaacagttacaggtactatcaagaaccttactgattacggtgcattcgttgatcttggcggtattgatggtcttcttcatatcacagatatggcttggaagcgtatcaagcacccttcagaagttgttgaagttggtcaagaagttactgttaaagtacttaaatttgaccgtgaacgtaaccgcgtatctttaggccttaaacaattaggcgaagatccatggttagcgatcatgagccgttaccctaaaggttctatcgttaaagcacgtgttactaacttaactgactacggttgtttcgctgaaatcgctgaaggcgttgaaggtttagtacacgtttctgaaatggaccacactaacaaaaacatccacccatctaaagttgttcagatcggtgacgaagttgatgttatggttcttgaagttgacgaagaacgtcgtcgtatcagccttggtatcaaacaaactcgtgctaacccatgggaagagtttgctaagtctcatgagaaaggcgaaaaagtttcaggcacaatcaagtctatcactgactttggtatcttcattggtttaaatggcggtatcgacggtctagttcacttgtctgatatttcttggaacgaacaaggcgaagaagctatccgtcgttacaagaaaggtgacactgttgaagcagttatcttgtctgtagacgctgaaggtaaccgtatcagccttggtatcaagcaattgaacagcgatccgttcaatgatttcttagctgctaacgaacgtggtgctttagttaaaggtactgtgactgcagttgatgctcgtggcgcaactgttaagttagctgacgaagtagaagctactcttaaagcttctgaaatcaaccgtgaccgcgttgaagatgcaactaaattcttagaagttggtcaagaagttgaagctaaaatcatcaacgttgatcgtaaatctcgctctatcaacttgtctatcaaagcgaaagacgaagctgaagagaaagaagcagtagctaacttacgtacagcatcagcttctcaagaaaatggtcctaagactattggtgacttgatcaaagcgcaaatgaagtaataagttaacaaagtacagtttcatgtttttaagcatctcggagaaatcgaatggctttaactaatgcagaccgcgcagagatcattgctaaatttgctcgcgctgaaaacgacactggttcaccagaagtacaagtagctttattgactgctcaaatcaatgatttacaaggtcactttaaagctcacaaacacgaccaccatagccgtcgcggtttgatccgtatggttaaccaacgtcgtaaattacttgactacttaaatggtaaagaccacgagcgttacactgctttgatcggtgctttaggtctacgtcgttaattcgattttgctttgttttcggtttcaacttattttcaaggagtgcaagagtggcaaactctgctcaagctaaaaaacgtgcgcgccaaaacgttaaagcgcgtaaacacaacgcaagcttgcgttctatggttcgtacttacatcaaacgtactttaagtgcaatcgctggtggtgattatgctgttgctacagaagcttacaaaaaagctgttcctgtaatcgaccgcatggctgataaaggcatcatccacaaaaataaagctgctcgtcataagagccgtttaaatgctcaagttaaagctttagctaactaattgaagcatgtaaaaaaagcccgtaagaattataaggcttttatcatggttgttattcgtttagcacgtggcggcgcaaaaaaacgtccattctatcaaatcgttgtgactgatagccgcaatgcacgtgatggtcgtttcatcgagcgtatcggtttctttaacccaactgcacaaggtcaagcagaaaaacttcgtttagacgcagaccgttttgctcactgggtttctcaaggtgctcaaccttctgaacgtgttgcttctttggctgctcaagctaaaaaagctactgcataattattgtagtaggtagcccatgacactgtttaaaccgtaaggagctgacaatgcgtcattacgaaatcgtacttttggtacatccagaccaaagcgatcaagttgtaggtatggttgaacgctatatctctcagatcaaagaagctgatggtcaaattcaccgtttagaagattggggccgtcgtcaattggcttacccaattaacaaaattcacaaagcgcactacattcttatgaatgttgaatgtggtcaaactacgcttgatgagttagaagaattattccgttataacgacgcgatcattcgtaaccttatcatccgtcgtgaacacgcaatcactgaagagtcattgcttgctaagagtgctgaagaaaagcgtgcgcgtaaagctcaacgcgaagaagcacagcaagttgctcaagaagctgaataaggagaacatcaatggcacgtttttaccgtcgtcgcaagttctgccgctttacagctgagaatgttgcgtacatcgactacaaagatatcgacactttaaaacagtacatcactgaaaacggcaagattgttcctagccgtatcactggtactaaagctcgttatcaacgtcaattagcacttgctatcaaacaagctcgctatttgtctttgattccgtacactgacaaccataagtgaggtgatctgtggacgttatcttattacaacgcattaagaaccttggtaaattaggcgataaagtatcagttaaagctggttacggccgtaactttcttatccctcaaggtaaagcagttgcagctactgaagctaacactgctgcttttgaagctcgtcgtgctgaacttgagaagcaagaagctgaagtattagctgctgctcaagcacgtgctgaacaattgaatgaagttaacatcgttatcactgctaaagctggtgacgaaggtaaactcttcggttctatcggtactcgtgacatcgctgacgcgttaacgaatgctggtcttacagttgaccgtgcagaagttcgtttaccaaacggtgcgcttcgtcacactggtgaattcaacatcgcaatccaattgcatcatgatgttgttgcagaagttctcgttactatcgtatctgagtaatttctcatcaaaaaaagagcatgctaccaactataataggtagtggtttaatgaaaactctcagcgctaagccagctgaagttcaacatgactggtatgttgttgatgcttctggcaaaactttaggtcgccttgcgactgaaatcgctcgtcgtttacgcggtaagcataaaacttcttatactcctcacgttgacactggcgattacatcgttgtgattaatgctgaacaaattcaagtgactggtaacaaatcacttgataagaaatattatcgccatactggtttccctggtggtatccgtgagactaacttcgagaagttaattgctcacaaacctgaagctgttcttgaaaaagcggttaaaggcatgttaccaaaaggtcctcttggttatgcaatgatcaaaaaaatgaaagtgtacgctggtactgagcatcctcatgctgctcaacagccacaagttttggacatctaagggatacagcacatggctactaattatggtacaggtcgccgtaagaccgcaactgcacgtgttttcttgtcagctggtacaggtaaactcgttattaacaaccgtactttagagcaatatttcggtcgtgaaactgctcgtatggttgttcgtcaacctttagaacttttagaagttactgaaaagtttgacctttacatcactgttaaaggtggtggtatcggtggtcaagctggcgcgatccgtcacggtattactcgtgcgcttatcgctgctgacgaaactttaaaacctgttctacgtcaagctggtttcgttactcgtgatgctcgtgaagttgagcgtaagaaacttggtttacgtaaagctcgtaaacgtcctcaattctctaaacgttaattcgtttaccgaatcggacaaaaagttatccataatctagaggattttacatgccacaagttaagttgaaagaaggcgaaccagttgacgtagctatccgtcgtttcaaacgttcatgcgaaaaagctggtgttttagctgacgttcgtaagcgcgaattctacgaaaaaccaactcaagaacgtaagcgcaaaaaagctgctgcagttaaacgctaccaaaagaaattggctcgcgaatctgtacgtactactcgcctttactaattaatttgtgattgactgctaacatacttaattaacggcactcctcagccaagtcaaaagcctccggtcggaggcttttgactacatgcccatggcgtttacgccccgccctgccactcatcgcagtactgttgtaattcattaagcattctgccgacatggaagccatcacaaacggcatgatgaacctgaatcgccagcggcatcagcaccttgtcgccttgcgtataatatttgcccatagtgaaaacgggggcgaagaagttgtccatattggccacgtttaaatcaaaactggtgaaactcacccagggattggctgagacgaaaaacatattctcaataaaccctttagggaaataggccaggttttcaccgtaacacgccacatcttgcgaatatatgtgtagaaactgccggaaatcgtcgtggtattcactccagagcgatgaaaacgtttcagtttgctcatggaaaacggtgtaacaagggtgaacactatcccatatcaccagctcaccgtctttcattgccatacggaactccggatgagcattcatcaggcgggcaagaatgtgaataaaggccggataaaacttgtgcttatttttctttacggtctttaaaaaggccgtaatatccagctgaacggtctggttataggtacattgagcaactgactgaaatgcctcaaaatgttctttacgatgccattgggatatatcaacggtggtatatccagtgatttttttctccattttagcttccttagctcctgaaaatctcgataactcaaaaaatacgcccggtagtgatcttatttcattatggtgaaagttggaacctcttacgtgccaagccaaataggccgt

SEQ ID NO: 226 - DNA, 5550 bp, Artificial
  Synthetic
tcagatccttccgtatttagccagtatgttctctagtgtggttcgttgtttttgcgtgagccatgagaacgaaccattgagatcatgcttactttgcatgtcactcaaaaattttgcctcaaaactggtgagctgaatttttgcagttaaagcatcgtgtagtgtttttcttagtccgttacgtaggtaggaatctgatgtaatggttgttggtattttgtcaccattcatttttatctggttgttctcaagttcggttacgagatccatttgtctatctagttcaacttggaaaatcaacgtatcagtcgggcggcctcgcttatcaaccaccaatttcatattgctgtaagtgtttaaatctttacttattggtttcaaaacccattggttaagccttttaaactcatggtagttattttcaagcattaacatgaacttaaattcatcaaggctaatctctatatttgccttgtgagttttcttttgtgttagttcttttaataaccactcataaatcctcatagagtatttgttttcaaaagacttaacatgttccagattatattttatgaatttttttaactggaaaagataaggcaatatctcttcactaaaaactaattctaatttttcgcttgagaacttggcatagtttgtccactggaaaatcttaaagcctttaaccaaaggattcctgatttccacagttctcgtcatcagctctctggttgctttagctaatacaccataagcattttccctactgatgttcatcatctgagcgtattggttataagtgaacgataccgtccgttctttccttgtagggttttcaatcgtggggttgagtagtgccacacagcataaaattagcttggtttcatgctccgttaagtcatagcgactaatcgctagttcatttgctttgaaaacaactaattcagacatacatctcaattggtctaggtgattttaatcactataccaattgagatgggctagtcaatgataattactagtccttttcctttgagttgtgggtatctgtaaattctgctagacctttgctggaaaacttgtaaattctgctagaccctctgtaaattccgctagacctttgtgtgttttttttgtttatattcaagtggttataatttatagaataaagaaagaataaaaaaagataaaaagaatagatcccagccctgtgtataactcactactttagtcagttccgcagtattacaaaaggatgtcgcaaacgctgtttgctcctctacaaaacagaccttaaaaccctaaaggcttaagtagcaccctcgcaagctcgggcaaatcgctgaatattccttttgtctccgaccatcaggcacctgagtcgctgtctttttcgtgacattcagttcgctgcgctcacggctctggcagtgaatgggggtaaatggcactacaggcgccttttatggattcatgcaaggaaactacccataatacaagaaaagcccgtcacgggcttctcagggcgttttatggcgggtctgctatgtggtgctatctgactttttgctgttcagcagttcctgccctctgattttccagtctgaccacttcggattatcccgtgacaggtcattcagactggctaatgcacccagtaaggcagcggtatcatcaacaggcttacccgtcttactgtcaagaggacatccggtcaaataaaacgaaaggctcagtcgaaagactgggcctttcgttttgctgaggagacttagggaccctttatgacaacttgacggctacatcattcactttttcttcacaaccggcacggaactcgctcgggctggccccggtgcattttttaaatacccgcgagaaatagagttgatcgtcaaaaccaacattgcgaccgacggtggcgataggcatccgggtggtgctcaaaagcagcttcgcctggctgatacgttggtcctcgcgccagcttaagacgctaatccctaactgctggcggaaaagatgtgacagacgcgacggcgacaagcaaacatgctgtgcgacgctggcgatatcaaaattgctgtctgccaggtgatcgctgatgtactgacaagcctcgcgtacccgattatccatcggtggatggagcgactcgttaatcgcttccatgcgccgcagtaacaattgctcaagcagatttatcgccagcagctccgaatagcgcccttccccttgcccggcgttaatgatttgcccaaacaggtcgctgaaatgcggctggtgcgcttcatccgggcgaaagaaccccgtattggcaaatattgacggccagttaagccattcatgccagtaggcgcgcggacgaaagtaaacccactggtgataccattcgcgagcctccggatgacgaccgtagtgatgaatctctcctggcgggaacagcaaaatatcacccggtcggcaaacaaattctcgtccctgatttttcaccaccccctgaccgcgaatggtgagattgagaatataacctttcattcccagcggtcggtcgataaaaaaatcgagataaccgttggcctcaatcggcgttaaacccgccaccagatgggcattaaacgagtatcccggcagcaggggatcattttgcgcttcagccatacttttcatactcccaccattcagagaagaaaccaattgtccatattgcatcagacattgccgtcactgcgtcttttactggctcttctcgctaacccaaccggtaaccccgcttattaaaagcattctgtaacaaagcgggaccaaagccatgacaaaaacgcgtaacaaaagtgtctataatcacggcagaaaagtccacattgattatttgcacggcgtcacactttgctatgccatagcatttttatccataagattagcggatcctacctgacgctttttatcgcaactctctactgtttctccatacccgttttacctgcaggtgcagtgaccgctgactttatcaggtatatcatgaccgaatcttttgcagccctctttgaagaaagtgaattaaacctcaacgttgaaaagggtgcagtcatccaaggtgttgttgtaaacatcgatagcgactgggttactgttgacactggccttaaatcagaaggcattgttgaccgtgctgaatttttaaatgaacaacgtgaacttgaagttcaggttggtgacactgttgacgtagttgttgaagctcttgacaacggtatgggtcaaacagttttatcacgtgaaaaagctaaacgtgctgaaacttggactaaacttgaaaaaatctttgaagatggcgaaatcgttactggtgttatctctggtaaagttaaaggcggtttcactgttgacatcggtcctgttcgtgcgttcttaccaggttcattagttgacactcgtcctatccgtgacactactcaccttgaaggtaaagagttagagtttaaagtaatcaaacttgatgctaaacgtaacaacgttgttgtatctcgtcgtgctgttatggaagctgaatcttctgctgaccgtgaagcattacttgctcaacttgaagaaggtcaaacagttacaggtactatcaagaaccttactgattacggtgcattcgttgatcttggcggtattgatggtcttcttcatatcacagatatggcttggaagcgtatcaagcacccttcagaagttgttgaagttggtcaagaagttactgttaaagtacttaaatttgaccgtgaacgtaaccgcgtatctttaggccttaaacaattaggcgaagatccatggttagcgatcatgagccgttaccctaaaggttctatcgttaaagcacgtgttactaacttaactgactacggttgtttcgctgaaatcgctgaaggcgttgaaggtttagtacacgtttctgaaatggaccacactaacaaaaacatccacccatctaaagttgttcagatcggtgacgaagttgatgttatggttcttgaagttgacgaagaacgtcgtcgtatcagccttggtatcaaacaaactcgtgctaacccatgggaagagtttgctaagtctcatgagaaaggcgaaaaagtttcaggcacaatcaagtctatcactgactttggtatcttcattggtttaaatggcggtatcgacggtctagttcacttgtctgatatttcttggaacgaacaaggcgaagaagctatccgtcgttacaagaaaggtgacactgttgaagcagttatcttgtctgtagacgctgaaggtaaccgtatcagccttggtatcaagcaattgaacagcgatccgttcaatgatttcttagctgctaacgaacgtggtgctttagttaaaggtactgtgactgcagttgatgctcgtggcgcaactgttaagttagctgacgaagtagaagctactcttaaagcttctgaaatcaaccgtgaccgcgttgaagatgcaactaaattcttagaagttggtcaagaagttgaagctaaaatcatcaacgttgatcgtaaatctcgctctatcaacttgtctatcaaagcgaaagacgaagctgaagagaaagaagcagtagctaacttacgtacagcatcagcttctcaagaaaatggtcctaagactattggtgacttgatcaaagcgcaaatgaagtaataagttaaacttaattaacggcactcctcagccaagtcaaaagcctccggtcggaggcttttgactacatgcccatggcgtttacgccccgccctgccactcatcgcagtactgttgtaattcattaagcattctgccgacatggaagccatcacaaacggcatgatgaacctgaatcgccagcggcatcagcaccttgtcgccttgcgtataatatttgcccatagtgaaaacgggggcgaagaagttgtccatattggccacgtttaaatcaaaactggtgaaactcacccagggattggctgagacgaaaaacatattctcaataaaccctttagggaaataggccaggttttcaccgtaacacgccacatcttgcgaatatatgtgtagaaactgccggaaatcgtcgtggtattcactccagagcgatgaaaacgtttcagtttgctcatggaaaacggtgtaacaagggtgaacactatcccatatcaccagctcaccgtctttcattgccatacggaactccggatgagcattcatcaggcgggcaagaatgtgaataaaggccggataaaacttgtgcttatttttctttacggtctttaaaaaggccgtaatatccagctgaacggtctggttataggtacattgagcaactgactgaaatgcctcaaaatgttctttacgatgccattgggatatatcaacggtggtatatccagtgatttttttctccattttagcttccttagctcctgaaaatctcgataactcaaaaaatacgcccggtagtgatcttatttcattatggtgaaagttggaacctcttacgtgccaggccaaataggccgt

SEQ ID NO: 227 - DNA, 4146 bp, Artificial
  Synthetic
tcagatccttccgtatttagccagtatgttctctagtgtggttcgttgtttttgcgtgagccatgagaacgaaccattgagatcatgcttactttgcatgtcactcaaaaattttgcctcaaaactggtgagctgaatttttgcagttaaagcatcgtgtagtgtttttcttagtccgttacgtaggtaggaatctgatgtaatggttgttggtattttgtcaccattcatttttatctggttgttctcaagttcggttacgagatccatttgtctatctagttcaacttggaaaatcaacgtatcagtcgggcggcctcgcttatcaaccaccaatttcatattgctgtaagtgtttaaatctttacttattggtttcaaaacccattggttaagccttttaaactcatggtagttattttcaagcattaacatgaacttaaattcatcaaggctaatctctatatttgccttgtgagttttcttttgtgttagttcttttaataaccactcataaatcctcatagagtatttgttttcaaaagacttaacatgttccagattatattttatgaatttttttaactggaaaagataaggcaatatctcttcactaaaaactaattctaatttttcgcttgagaacttggcatagtttgtccactggaaaatcttaaagcctttaaccaaaggattcctgatttccacagttctcgtcatcagctctctggttgctttagctaatacaccataagcattttccctactgatgttcatcatctgagcgtattggttataagtgaacgataccgtccgttctttccttgtagggttttcaatcgtggggttgagtagtgccacacagcataaaattagcttggtttcatgctccgttaagtcatagcgactaatcgctagttcatttgctttgaaaacaactaattcagacatacatctcaattggtctaggtgattttaatcactataccaattgagatgggctagtcaatgataattactagtccttttcctttgagttgtgggtatctgtaaattctgctagacctttgctggaaaacttgtaaattctgctagaccctctgtaaattccgctagacctttgtgtgttttttttgtttatattcaagtggttataatttatagaataaagaaagaataaaaaaagataaaaagaatagatcccagccctgtgtataactcactactttagtcagttccgcagtattacaaaaggatgtcgcaaacgctgtttgctcctctacaaaacagaccttaaaaccctaaaggcttaagtagcaccctcgcaagctcgggcaaatcgctgaatattccttttgtctccgaccatcaggcacctgagtcgctgtctttttcgtgacattcagttcgctgcgctcacggctctggcagtgaatgggggtaaatggcactacaggcgccttttatggattcatgcaaggaaactacccataatacaagaaaagcccgtcacgggcttctcagggcgttttatggcgggtctgctatgtggtgctatctgactttttgctgttcagcagttcctgccctctgattttccagtctgaccacttcggattatcccgtgacaggtcattcagactggctaatgcacccagtaaggcagcggtatcatcaacaggcttacccgtcttactgtcaagaggacatccggtcaaataaaacgaaaggctcagtcgaaagactgggcctttcgttttgctgaggagacttagggaccctttatgacaacttgacggctacatcattcactttttcttcacaaccggcacggaactcgctcgggctggccccggtgcattttttaaatacccgcgagaaatagagttgatcgtcaaaaccaacattgcgaccgacggtggcgataggcatccgggtggtgctcaaaagcagcttcgcctggctgatacgttggtcctcgcgccagcttaagacgctaatccctaactgctggcggaaaagatgtgacagacgcgacggcgacaagcaaacatgctgtgcgacgctggcgatatcaaaattgctgtctgccaggtgatcgctgatgtactgacaagcctcgcgtacccgattatccatcggtggatggagcgactcgttaatcgcttccatgcgccgcagtaacaattgctcaagcagatttatcgccagcagctccgaatagcgcccttccccttgcccggcgttaatgatttgcccaaacaggtcgctgaaatgcggctggtgcgcttcatccgggcgaaagaaccccgtattggcaaatattgacggccagttaagccattcatgccagtaggcgcgcggacgaaagtaaacccactggtgataccattcgcgagcctccggatgacgaccgtagtgatgaatctctcctggcgggaacagcaaaatatcacccggtcggcaaacaaattctcgtccctgatttttcaccaccccctgaccgcgaatggtgagattgagaatataacctttcattcccagcggtcggtcgataaaaaaatcgagataaccgttggcctcaatcggcgttaaacccgccaccagatgggcattaaacgagtatcccggcagcaggggatcattttgcgcttcagccatacttttcatactcccaccattcagagaagaaaccaattgtccatattgcatcagacattgccgtcactgcgtcttttactggctcttctcgctaacccaaccggtaaccccgcttattaaaagcattctgtaacaaagcgggaccaaagccatgacaaaaacgcgtaacaaaagtgtctataatcacggcagaaaagtccacattgattatttgcacggcgtcacactttgctatgccatagcatttttatccataagattagcggatcctacctgacgctttttatcgcaactctctactgtttctccatacccgttttacctgcaggtgcagttttttaagcatctcggagaaatcgaatggctttaactaatgcagaccgcgcagagatcattgctaaatttgctcgcgctgaaaacgacactggttcaccagaagtacaagtagctttattgactgctcaaatcaatgatttacaaggtcactttaaagctcacaaacacgaccaccatagccgtcgcggtttgatccgtatggttaaccaacgtcgtaaattacttgactacttaaatggtaaagaccacgagcgttacactgctttgatcggtgctttaggtctacgtcgttaattcgatttacttaattaacggcactcctcagccaagtcaaaagcctccggtcggaggcttttgactacatgcccatggcgtttacgccccgccctgccactcatcgcagtactgttgtaattcattaagcattctgccgacatggaagccatcacaaacggcatgatgaacctgaatcgccagcggcatcagcaccttgtcgccttgcgtataatatttgcccatagtgaaaacgggggcgaagaagttgtccatattggccacgtttaaatcaaaactggtgaaactcacccagggattggctgagacgaaaaacatattctcaataaaccctttagggaaataggccaggttttcaccgtaacacgccacatcttgcgaatatatgtgtagaaactgccggaaatcgtcgtggtattcactccagagcgatgaaaacgtttcagtttgctcatggaaaacggtgtaacaagggtgaacactatcccatatcaccagctcaccgtctttcattgccatacggaactccggatgagcattcatcaggcgggcaagaatgtgaataaaggccggataaaacttgtgcttatttttctttacggtctttaaaaaggccgtaatatccagctgaacggtctggttataggtacattgagcaactgactgaaatgcctcaaaatgttctttacgatgccattgggatatatcaacggtggtatatccagtgatttttttctccattttagcttccttagctcctgaaaatctcgataactcaaaaaatacgcccggtagtgatcttatttcattatggtgaaagttggaacctcttacgtgccaggccaaataggccgt

SEQ ID NO: 228 - DNA, 4138 bp, Artificial
  Synthetic
tcagatccttccgtatttagccagtatgttctctagtgtggttcgttgtttttgcgtgagccatgagaacgaaccattgagatcatgcttactttgcatgtcactcaaaaattttgcctcaaaactggtgagctgaatttttgcagttaaagcatcgtgtagtgtttttcttagtccgttacgtaggtaggaatctgatgtaatggttgttggtattttgtcaccattcatttttatctggttgttctcaagttcggttacgagatccatttgtctatctagttcaacttggaaaatcaacgtatcagtcgggcggcctcgcttatcaaccaccaatttcatattgctgtaagtgtttaaatctttacttattggtttcaaaacccattggttaagccttttaaactcatggtagttattttcaagcattaacatgaacttaaattcatcaaggctaatctctatatttgccttgtgagttttcttttgtgttagttcttttaataaccactcataaatcctcatagagtatttgttttcaaaagacttaacatgttccagattatattttatgaatttttttaactggaaaagataaggcaatatctcttcactaaaaactaattctaatttttcgcttgagaacttggcatagtttgtccactggaaaatcttaaagcctttaaccaaaggattcctgatttccacagttctcgtcatcagctctctggttgctttagctaatacaccataagcattttccctactgatgttcatcatctgagcgtattggttataagtgaacgataccgtccgttctttccttgtagggttttcaatcgtggggttgagtagtgccacacagcataaaattagcttggtttcatgctccgttaagtcatagcgactaatcgctagttcatttgctttgaaaacaactaattcagacatacatctcaattggtctaggtgattttaatcactataccaattgagatgggctagtcaatgataattactagtccttttcctttgagttgtgggtatctgtaaattctgctagacctttgctggaaaacttgtaaattctgctagaccctctgtaaattccgctagacctttgtgtgttttttttgtttatattcaagtggttataatttatagaataaagaaagaataaaaaaagataaaaagaatagatcccagccctgtgtataactcactactttagtcagttccgcagtattacaaaaggatgtcgcaaacgctgtttgctcctctacaaaacagaccttaaaaccctaaaggcttaagtagcaccctcgcaagctcgggcaaatcgctgaatattccttttgtctccgaccatcaggcacctgagtcgctgtctttttcgtgacattcagttcgctgcgctcacggctctggcagtgaatgggggtaaatggcactacaggcgccttttatggattcatgcaaggaaactacccataatacaagaaaagcccgtcacgggcttctcagggcgttttatggcgggtctgctatgtggtgctatctgactttttgctgttcagcagttcctgccctctgattttccagtctgaccacttcggattatcccgtgacaggtcattcagactggctaatgcacccagtaaggcagcggtatcatcaacaggcttacccgtcttactgtcaagaggacatccggtcaaataaaacgaaaggctcagtcgaaagactgggcctttcgttttgctgaggagacttagggaccctttatgacaacttgacggctacatcattcactttttcttcacaaccggcacggaactcgctcgggctggccccggtgcattttttaaatacccgcgagaaatagagttgatcgtcaaaaccaacattgcgaccgacggtggcgataggcatccgggtggtgctcaaaagcagcttcgcctggctgatacgttggtcctcgcgccagcttaagacgctaatccctaactgctggcggaaaagatgtgacagacgcgacggcgacaagcaaacatgctgtgcgacgctggcgatatcaaaattgctgtctgccaggtgatcgctgatgtactgacaagcctcgcgtacccgattatccatcggtggatggagcgactcgttaatcgcttccatgcgccgcagtaacaattgctcaagcagatttatcgccagcagctccgaatagcgcccttccccttgcccggcgttaatgatttgcccaaacaggtcgctgaaatgcggctggtgcgcttcatccgggcgaaagaaccccgtattggcaaatattgacggccagttaagccattcatgccagtaggcgcgcggacgaaagtaaacccactggtgataccattcgcgagcctccggatgacgaccgtagtgatgaatctctcctggcgggaacagcaaaatatcacccggtcggcaaacaaattctcgtccctgatttttcaccaccccctgaccgcgaatggtgagattgagaatataacctttcattcccagcggtcggtcgataaaaaaatcgagataaccgttggcctcaatcggcgttaaacccgccaccagatgggcattaaacgagtatcccggcagcaggggatcattttgcgcttcagccatacttttcatactcccaccattcagagaagaaaccaattgtccatattgcatcagacattgccgtcactgcgtcttttactggctcttctcgctaacccaaccggtaaccccgcttattaaaagcattctgtaacaaagcgggaccaaagccatgacaaaaacgcgtaacaaaagtgtctataatcacggcagaaaagtccacattgattatttgcacggcgtcacactttgctatgccatagcatttttatccataagattagcggatcctacctgacgctttttatcgcaactctctactgtttctccatacccgttttacctgcaggtgcagttattttcaaggagtgcaagagtggcaaactctgctcaagctaaaaaacgtgcgcgccaaaacgttaaagcgcgtaaacacaacgcaagcttgcgttctatggttcgtacttacatcaaacgtactttaagtgcaatcgctggtggtgattatgctgttgctacagaagcttacaaaaaagctgttcctgtaatcgaccgcatggctgataaaggcatcatccacaaaaataaagctgctcgtcataagagccgtttaaatgctcaagttaaagctttagctaactaattgaagcaacttaattaacggcactcctcagccaagtcaaaagcctccggtcggaggcttttgactacatgcccatggcgtttacgccccgccctgccactcatcgcagtactgttgtaattcattaagcattctgccgacatggaagccatcacaaacggcatgatgaacctgaatcgccagcggcatcagcaccttgtcgccttgcgtataatatttgcccatagtgaaaacgggggcgaagaagttgtccatattggccacgtttaaatcaaaactggtgaaactcacccagggattggctgagacgaaaaacatattctcaataaaccctttagggaaataggccaggttttcaccgtaacacgccacatcttgcgaatatatgtgtagaaactgccggaaatcgtcgtggtattcactccagagcgatgaaaacgtttcagtttgctcatggaaaacggtgtaacaagggtgaacactatcccatatcaccagctcaccgtctttcattgccatacggaactccggatgagcattcatcaggcgggcaagaatgtgaataaaggccggataaaacttgtgcttatttttctttacggtctttaaaaaggccgtaatatccagctgaacggtctggttataggtacattgagcaactgactgaaatgcctcaaaatgttctttacgatgccattgggatatatcaacggtggtatatccagtgatttttttctccattttagcttccttagctcctgaaaatctcgataactcaaaaaatacgcccggtagtgatcttatttcattatggtgaaagttggaacctcttacgtgccaggccaaataggccgt

SEQ ID NO: 229 - DNA, 4123 bp, Artificial
  Synthetic
tcagatccttccgtatttagccagtatgttctctagtgtggttcgttgtttttgcgtgagccatgagaacgaaccattgagatcatgcttactttgcatgtcactcaaaaattttgcctcaaaactggtgagctgaatttttgcagttaaagcatcgtgtagtgtttttcttagtccgttacgtaggtaggaatctgatgtaatggttgttggtattttgtcaccattcatttttatctggttgttctcaagttcggttacgagatccatttgtctatctagttcaacttggaaaatcaacgtatcagtcgggcggcctcgcttatcaaccaccaatttcatattgctgtaagtgtttaaatctttacttattggtttcaaaacccattggttaagccttttaaactcatggtagttattttcaagcattaacatgaacttaaattcatcaaggctaatctctatatttgccttgtgagttttcttttgtgttagttcttttaataaccactcataaatcctcatagagtatttgttttcaaaagacttaacatgttccagattatattttatgaatttttttaactggaaaagataaggcaatatctcttcactaaaaactaattctaatttttcgcttgagaacttggcatagtttgtccactggaaaatcttaaagcctttaaccaaaggattcctgatttccacagttctcgtcatcagctctctggttgctttagctaatacaccataagcattttccctactgatgttcatcatctgagcgtattggttataagtgaacgataccgtccgttctttccttgtagggttttcaatcgtggggttgagtagtgccacacagcataaaattagcttggtttcatgctccgttaagtcatagcgactaatcgctagttcatttgctttgaaaacaactaattcagacatacatctcaattggtctaggtgattttaatcactataccaattgagatgggctagtcaatgataattactagtccttttcctttgagttgtgggtatctgtaaattctgctagacctttgctggaaaacttgtaaattctgctagaccctctgtaaattccgctagacctttgtgtgttttttttgtttatattcaagtggttataatttatagaataaagaaagaataaaaaaagataaaaagaatagatcccagccctgtgtataactcactactttagtcagttccgcagtattacaaaaggatgtcgcaaacgctgtttgctcctctacaaaacagaccttaaaaccctaaaggcttaagtagcaccctcgcaagctcgggcaaatcgctgaatattccttttgtctccgaccatcaggcacctgagtcgctgtctttttcgtgacattcagttcgctgcgctcacggctctggcagtgaatgggggtaaatggcactacaggcgccttttatggattcatgcaaggaaactacccataatacaagaaaagcccgtcacgggcttctcagggcgttttatggcgggtctgctatgtggtgctatctgactttttgctgttcagcagttcctgccctctgattttccagtctgaccacttcggattatcccgtgacaggtcattcagactggctaatgcacccagtaaggcagcggtatcatcaacaggcttacccgtcttactgtcaagaggacatccggtcaaataaaacgaaaggctcagtcgaaagactgggcctttcgttttgctgaggagacttagggaccctttatgacaacttgacggctacatcattcactttttcttcacaaccggcacggaactcgctcgggctggccccggtgcattttttaaatacccgcgagaaatagagttgatcgtcaaaaccaacattgcgaccgacggtggcgataggcatccgggtggtgctcaaaagcagcttcgcctggctgatacgttggtcctcgcgccagcttaagacgctaatccctaactgctggcggaaaagatgtgacagacgcgacggcgacaagcaaacatgctgtgcgacgctggcgatatcaaaattgctgtctgccaggtgatcgctgatgtactgacaagcctcgcgtacccgattatccatcggtggatggagcgactcgttaatcgcttccatgcgccgcagtaacaattgctcaagcagatttatcgccagcagctccgaatagcgcccttccccttgcccggcgttaatgatttgcccaaacaggtcgctgaaatgcggctggtgcgcttcatccgggcgaaagaaccccgtattggcaaatattgacggccagttaagccattcatgccagtaggcgcgcggacgaaagtaaacccactggtgataccattcgcgagcctccggatgacgaccgtagtgatgaatctctcctggcgggaacagcaaaatatcacccggtcggcaaacaaattctcgtccctgatttttcaccaccccctgaccgcgaatggtgagattgagaatataacctttcattcccagcggtcggtcgataaaaaaatcgagataaccgttggcctcaatcggcgttaaacccgccaccagatgggcattaaacgagtatcccggcagcaggggatcattttgcgcttcagccatacttttcatactcccaccattcagagaagaaaccaattgtccatattgcatcagacattgccgtcactgcgtcttttactggctcttctcgctaacccaaccggtaaccccgcttattaaaagcattctgtaacaaagcgggaccaaagccatgacaaaaacgcgtaacaaaagtgtctataatcacggcagaaaagtccacattgattatttgcacggcgtcacactttgctatgccatagcatttttatccataagattagcggatcctacctgacgctttttatcgcaactctctactgtttctccatacccgttttacctgcaggtgcagtagaattataaggcttttatcatggttgttattcgtttagcacgtggcggcgcaaaaaaacgtccattctatcaaatcgttgtgactgatagccgcaatgcacgtgatggtcgtttcatcgagcgtatcggtttctttaacccaactgcacaaggtcaagcagaaaaacttcgtttagacgcagaccgttttgctcactgggtttctcaaggtgctcaaccttctgaacgtgttgcttctttggctgctcaagctaaaaaagctactgcataattattgtaacttaattaacggcactcctcagccaagtcaaaagcctccggtcggaggcttttgactacatgcccatggcgtttacgccccgccctgccactcatcgcagtactgttgtaattcattaagcattctgccgacatggaagccatcacaaacggcatgatgaacctgaatcgccagcggcatcagcaccttgtcgccttgcgtataatatttgcccatagtgaaaacgggggcgaagaagttgtccatattggccacgtttaaatcaaaactggtgaaactcacccagggattggctgagacgaaaaacatattctcaataaaccctttagggaaataggccaggttttcaccgtaacacgccacatcttgcgaatatatgtgtagaaactgccggaaatcgtcgtggtattcactccagagcgatgaaaacgtttcagtttgctcatggaaaacggtgtaacaagggtgaacactatcccatatcaccagctcaccgtctttcattgccatacggaactccggatgagcattcatcaggcgggcaagaatgtgaataaaggccggataaaacttgtgcttatttttctttacggtctttaaaaaggccgtaatatccagctgaacggtctggttataggtacattgagcaactgactgaaatgcctcaaaatgttctttacgatgccattgggatatatcaacggtggtatatccagtgatttttttctccattttagcttccttagctcctgaaaatctcgataactcaaaaaatacgcccggtagtgatcttatttcattatggtgaaagttggaacctcttacgtgccaggccaaataggccgt

SEQ ID NO: 230 - DNA, 4255 bp, Artificial
  Synthetic
tcagatccttccgtatttagccagtatgttctctagtgtggttcgttgtttttgcgtgagccatgagaacgaaccattgagatcatgcttactttgcatgtcactcaaaaattttgcctcaaaactggtgagctgaatttttgcagttaaagcatcgtgtagtgtttttcttagtccgttacgtaggtaggaatctgatgtaatggttgttggtattttgtcaccattcatttttatctggttgttctcaagttcggttacgagatccatttgtctatctagttcaacttggaaaatcaacgtatcagtcgggcggcctcgcttatcaaccaccaatttcatattgctgtaagtgtttaaatctttacttattggtttcaaaacccattggttaagccttttaaactcatggtagttattttcaagcattaacatgaacttaaattcatcaaggctaatctctatatttgccttgtgagttttcttttgtgttagttcttttaataaccactcataaatcctcatagagtatttgttttcaaaagacttaacatgttccagattatattttatgaatttttttaactggaaaagataaggcaatatctcttcactaaaaactaattctaatttttcgcttgagaacttggcatagtttgtccactggaaaatcttaaagcctttaaccaaaggattcctgatttccacagttctcgtcatcagctctctggttgctttagctaatacaccataagcattttccctactgatgttcatcatctgagcgtattggttataagtgaacgataccgtccgttctttccttgtagggttttcaatcgtggggttgagtagtgccacacagcataaaattagcttggtttcatgctccgttaagtcatagcgactaatcgctagttcatttgctttgaaaacaactaattcagacatacatctcaattggtctaggtgattttaatcactataccaattgagatgggctagtcaatgataattactagtccttttcctttgagttgtgggtatctgtaaattctgctagacctttgctggaaaacttgtaaattctgctagaccctctgtaaattccgctagacctttgtgtgttttttttgtttatattcaagtggttataatttatagaataaagaaagaataaaaaaagataaaaagaatagatcccagccctgtgtataactcactactttagtcagttccgcagtattacaaaaggatgtcgcaaacgctgtttgctcctctacaaaacagaccttaaaaccctaaaggcttaagtagcaccctcgcaagctcgggcaaatcgctgaatattccttttgtctccgaccatcaggcacctgagtcgctgtctttttcgtgacattcagttcgctgcgctcacggctctggcagtgaatgggggtaaatggcactacaggcgccttttatggattcatgcaaggaaactacccataatacaagaaaagcccgtcacgggcttctcagggcgttttatggcgggtctgctatgtggtgctatctgactttttgctgttcagcagttcctgccctctgattttccagtctgaccacttcggattatcccgtgacaggtcattcagactggctaatgcacccagtaaggcagcggtatcatcaacaggcttacccgtcttactgtcaagaggacatccggtcaaataaaacgaaaggctcagtcgaaagactgggcctttcgttttgctgaggagacttagggaccctttatgacaacttgacggctacatcattcactttttcttcacaaccggcacggaactcgctcgggctggccccggtgcattttttaaatacccgcgagaaatagagttgatcgtcaaaaccaacattgcgaccgacggtggcgataggcatccgggtggtgctcaaaagcagcttcgcctggctgatacgttggtcctcgcgccagcttaagacgctaatccctaactgctggcggaaaagatgtgacagacgcgacggcgacaagcaaacatgctgtgcgacgctggcgatatcaaaattgctgtctgccaggtgatcgctgatgtactgacaagcctcgcgtacccgattatccatcggtggatggagcgactcgttaatcgcttccatgcgccgcagtaacaattgctcaagcagatttatcgccagcagctccgaatagcgcccttccccttgcccggcgttaatgatttgcccaaacaggtcgctgaaatgcggctggtgcgcttcatccgggcgaaagaaccccgtattggcaaatattgacggccagttaagccattcatgccagtaggcgcgcggacgaaagtaaacccactggtgataccattcgcgagcctccggatgacgaccgtagtgatgaatctctcctggcgggaacagcaaaatatcacccggtcggcaaacaaattctcgtccctgatttttcaccaccccctgaccgcgaatggtgagattgagaatataacctttcattcccagcggtcggtcgataaaaaaatcgagataaccgttggcctcaatcggcgttaaacccgccaccagatgggcattaaacgagtatcccggcagcaggggatcattttgcgcttcagccatacttttcatactcccaccattcagagaagaaaccaattgtccatattgcatcagacattgccgtcactgcgtcttttactggctcttctcgctaacccaaccggtaaccccgcttattaaaagcattctgtaacaaagcgggaccaaagccatgacaaaaacgcgtaacaaaagtgtctataatcacggcagaaaagtccacattgattatttgcacggcgtcacactttgctatgccatagcatttttatccataagattagcggatcctacctgacgctttttatcgcaactctctactgtttctccatacccgttttacctgcaggtgcagttaaaccgtaaggagctgacaatgcgtcattacgaaatcgtacttttggtacatccagaccaaagcgatcaagttgtaggtatggttgaacgctatatctctcagatcaaagaagctgatggtcaaattcaccgtttagaagattggggccgtcgtcaattggcttacccaattaacaaaattcacaaagcgcactacattcttatgaatgttgaatgtggtcaaactacgcttgatgagttagaagaattattccgttataacgacgcgatcattcgtaaccttatcatccgtcgtgaacacgcaatcactgaagagtcattgcttgctaagagtgctgaagaaaagcgtgcgcgtaaagctcaacgcgaagaagcacagcaagttgctcaagaagctgaataaggagaacaacttaattaacggcactcctcagccaagtcaaaagcctccggtcggaggcttttgactacatgcccatggcgtttacgccccgccctgccactcatcgcagtactgttgtaattcattaagcattctgccgacatggaagccatcacaaacggcatgatgaacctgaatcgccagcggcatcagcaccttgtcgccttgcgtataatatttgcccatagtgaaaacgggggcgaagaagttgtccatattggccacgtttaaatcaaaactggtgaaactcacccagggattggctgagacgaaaaacatattctcaataaaccctttagggaaataggccaggttttcaccgtaacacgccacatcttgcgaatatatgtgtagaaactgccggaaatcgtcgtggtattcactccagagcgatgaaaacgtttcagtttgctcatggaaaacggtgtaacaagggtgaacactatcccatatcaccagctcaccgtctttcattgccatacggaactccggatgagcattcatcaggcgggcaagaatgtgaataaaggccggataaaacttgtgcttatttttctttacggtctttaaaaaggccgtaatatccagctgaacggtctggttataggtacattgagcaactgactgaaatgcctcaaaatgttctttacgatgccattgggatatatcaacggtggtatatccagtgatttttttctccattttagcttccttagctcctgaaaatctcgataactcaaaaaatacgcccggtagtgatcttatttcattatggtgaaagttggaacctcttacgtgccaggccaaataggccgt

SEQ ID NO: 231 - DNA, 4099 bp, Artificial
  Synthetic
tcagatccttccgtatttagccagtatgttctctagtgtggttcgttgtttttgcgtgagccatgagaacgaaccattgagatcatgcttactttgcatgtcactcaaaaattttgcctcaaaactggtgagctgaatttttgcagttaaagcatcgtgtagtgtttttcttagtccgttacgtaggtaggaatctgatgtaatggttgttggtattttgtcaccattcatttttatctggttgttctcaagttcggttacgagatccatttgtctatctagttcaacttggaaaatcaacgtatcagtcgggcggcctcgcttatcaaccaccaatttcatattgctgtaagtgtttaaatctttacttattggtttcaaaacccattggttaagccttttaaactcatggtagttattttcaagcattaacatgaacttaaattcatcaaggctaatctctatatttgccttgtgagttttcttttgtgttagttcttttaataaccactcataaatcctcatagagtatttgttttcaaaagacttaacatgttccagattatattttatgaatttttttaactggaaaagataaggcaatatctcttcactaaaaactaattctaatttttcgcttgagaacttggcatagtttgtccactggaaaatcttaaagcctttaaccaaaggattcctgatttccacagttctcgtcatcagctctctggttgctttagctaatacaccataagcattttccctactgatgttcatcatctgagcgtattggttataagtgaacgataccgtccgttctttccttgtagggttttcaatcgtggggttgagtagtgccacacagcataaaattagcttggtttcatgctccgttaagtcatagcgactaatcgctagttcatttgctttgaaaacaactaattcagacatacatctcaattggtctaggtgattttaatcactataccaattgagatgggctagtcaatgataattactagtccttttcctttgagttgtgggtatctgtaaattctgctagacctttgctggaaaacttgtaaattctgctagaccctctgtaaattccgctagacctttgtgtgttttttttgtttatattcaagtggttataatttatagaataaagaaagaataaaaaaagataaaaagaatagatcccagccctgtgtataactcactactttagtcagttccgcagtattacaaaaggatgtcgcaaacgctgtttgctcctctacaaaacagaccttaaaaccctaaaggcttaagtagcaccctcgcaagctcgggcaaatcgctgaatattccttttgtctccgaccatcaggcacctgagtcgctgtctttttcgtgacattcagttcgctgcgctcacggctctggcagtgaatgggggtaaatggcactacaggcgccttttatggattcatgcaaggaaactacccataatacaagaaaagcccgtcacgggcttctcagggcgttttatggcgggtctgctatgtggtgctatctgactttttgctgttcagcagttcctgccctctgattttccagtctgaccacttcggattatcccgtgacaggtcattcagactggctaatgcacccagtaaggcagcggtatcatcaacaggcttacccgtcttactgtcaagaggacatccggtcaaataaaacgaaaggctcagtcgaaagactgggcctttcgttttgctgaggagacttagggaccctttatgacaacttgacggctacatcattcactttttcttcacaaccggcacggaactcgctcgggctggccccggtgcattttttaaatacccgcgagaaatagagttgatcgtcaaaaccaacattgcgaccgacggtggcgataggcatccgggtggtgctcaaaagcagcttcgcctggctgatacgttggtcctcgcgccagcttaagacgctaatccctaactgctggcggaaaagatgtgacagacgcgacggcgacaagcaaacatgctgtgcgacgctggcgatatcaaaattgctgtctgccaggtgatcgctgatgtactgacaagcctcgcgtacccgattatccatcggtggatggagcgactcgttaatcgcttccatgcgccgcagtaacaattgctcaagcagatttatcgccagcagctccgaatagcgcccttccccttgcccggcgttaatgatttgcccaaacaggtcgctgaaatgcggctggtgcgcttcatccgggcgaaagaaccccgtattggcaaatattgacggccagttaagccattcatgccagtaggcgcgcggacgaaagtaaacccactggtgataccattcgcgagcctccggatgacgaccgtagtgatgaatctctcctggcgggaacagcaaaatatcacccggtcggcaaacaaattctcgtccctgatttttcaccaccccctgaccgcgaatggtgagattgagaatataacctttcattcccagcggtcggtcgataaaaaaatcgagataaccgttggcctcaatcggcgttaaacccgccaccagatgggcattaaacgagtatcccggcagcaggggatcattttgcgcttcagccatacttttcatactcccaccattcagagaagaaaccaattgtccatattgcatcagacattgccgtcactgcgtcttttactggctcttctcgctaacccaaccggtaaccccgcttattaaaagcattctgtaacaaagcgggaccaaagccatgacaaaaacgcgtaacaaaagtgtctataatcacggcagaaaagtccacattgattatttgcacggcgtcacactttgctatgccatagcatttttatccataagattagcggatcctacctgacgctttttatcgcaactctctactgtttctccatacccgttttacctgcaggtgcagtgctgaataaggagaacatcaatggcacgtttttaccgtcgtcgcaagttctgccgctttacagctgagaatgttgcgtacatcgactacaaagatatcgacactttaaaacagtacatcactgaaaacggcaagattgttcctagccgtatcactggtactaaagctcgttatcaacgtcaattagcacttgctatcaaacaagctcgctatttgtctttgattccgtacactgacaaccataagtgaggtgatctacttaattaacggcactcctcagccaagtcaaaagcctccggtcggaggcttttgactacatgcccatggcgtttacgccccgccctgccactcatcgcagtactgttgtaattcattaagcattctgccgacatggaagccatcacaaacggcatgatgaacctgaatcgccagcggcatcagcaccttgtcgccttgcgtataatatttgcccatagtgaaaacgggggcgaagaagttgtccatattggccacgtttaaatcaaaactggtgaaactcacccagggattggctgagacgaaaaacatattctcaataaaccctttagggaaataggccaggttttcaccgtaacacgccacatcttgcgaatatatgtgtagaaactgccggaaatcgtcgtggtattcactccagagcgatgaaaacgtttcagtttgctcatggaaaacggtgtaacaagggtgaacactatcccatatcaccagctcaccgtctttcattgccatacggaactccggatgagcattcatcaggcgggcaagaatgtgaataaaggccggataaaacttgtgcttatttttctttacggtctttaaaaaggccgtaatatccagctgaacggtctggttataggtacattgagcaactgactgaaatgcctcaaaatgttctttacgatgccattgggatatatcaacggtggtatatccagtgatttttttctccattttagcttccttagctcctgaaaatctcgataactcaaaaaatacgcccggtagtgatcttatttcattatggtgaaagttggaacctcttacgtgccaggccaaataggccgt

SEQ ID NO: 232 - DNA, 4319 bp, Artificial
  Synthetic
tcagatccttccgtatttagccagtatgttctctagtgtggttcgttgtttttgcgtgagccatgagaacgaaccattgagatcatgcttactttgcatgtcactcaaaaattttgcctcaaaactggtgagctgaatttttgcagttaaagcatcgtgtagtgtttttcttagtccgttacgtaggtaggaatctgatgtaatggttgttggtattttgtcaccattcatttttatctggttgttctcaagttcggttacgagatccatttgtctatctagttcaacttggaaaatcaacgtatcagtcgggcggcctcgcttatcaaccaccaatttcatattgctgtaagtgtttaaatctttacttattggtttcaaaacccattggttaagccttttaaactcatggtagttattttcaagcattaacatgaacttaaattcatcaaggctaatctctatatttgccttgtgagttttcttttgtgttagttcttttaataaccactcataaatcctcatagagtatttgttttcaaaagacttaacatgttccagattatattttatgaatttttttaactggaaaagataaggcaatatctcttcactaaaaactaattctaatttttcgcttgagaacttggcatagtttgtccactggaaaatcttaaagcctttaaccaaaggattcctgatttccacagttctcgtcatcagctctctggttgctttagctaatacaccataagcattttccctactgatgttcatcatctgagcgtattggttataagtgaacgataccgtccgttctttccttgtagggttttcaatcgtggggttgagtagtgccacacagcataaaattagcttggtttcatgctccgttaagtcatagcgactaatcgctagttcatttgctttgaaaacaactaattcagacatacatctcaattggtctaggtgattttaatcactataccaattgagatgggctagtcaatgataattactagtccttttcctttgagttgtgggtatctgtaaattctgctagacctttgctggaaaacttgtaaattctgctagaccctctgtaaattccgctagacctttgtgtgttttttttgtttatattcaagtggttataatttatagaataaagaaagaataaaaaaagataaaaagaatagatcccagccctgtgtataactcactactttagtcagttccgcagtattacaaaaggatgtcgcaaacgctgtttgctcctctacaaaacagaccttaaaaccctaaaggcttaagtagcaccctcgcaagctcgggcaaatcgctgaatattccttttgtctccgaccatcaggcacctgagtcgctgtctttttcgtgacattcagttcgctgcgctcacggctctggcagtgaatgggggtaaatggcactacaggcgccttttatggattcatgcaaggaaactacccataatacaagaaaagcccgtcacgggcttctcagggcgttttatggcgggtctgctatgtggtgctatctgactttttgctgttcagcagttcctgccctctgattttccagtctgaccacttcggattatcccgtgacaggtcattcagactggctaatgcacccagtaaggcagcggtatcatcaacaggcttacccgtcttactgtcaagaggacatccggtcaaataaaacgaaaggctcagtcgaaagactgggcctttcgttttgctgaggagacttagggaccctttatgacaacttgacggctacatcattcactttttcttcacaaccggcacggaactcgctcgggctggccccggtgcattttttaaatacccgcgagaaatagagttgatcgtcaaaaccaacattgcgaccgacggtggcgataggcatccgggtggtgctcaaaagcagcttcgcctggctgatacgttggtcctcgcgccagcttaagacgctaatccctaactgctggcggaaaagatgtgacagacgcgacggcgacaagcaaacatgctgtgcgacgctggcgatatcaaaattgctgtctgccaggtgatcgctgatgtactgacaagcctcgcgtacccgattatccatcggtggatggagcgactcgttaatcgcttccatgcgccgcagtaacaattgctcaagcagatttatcgccagcagctccgaatagcgcccttccccttgcccggcgttaatgatttgcccaaacaggtcgctgaaatgcggctggtgcgcttcatccgggcgaaagaaccccgtattggcaaatattgacggccagttaagccattcatgccagtaggcgcgcggacgaaagtaaacccactggtgataccattcgcgagcctccggatgacgaccgtagtgatgaatctctcctggcgggaacagcaaaatatcacccggtcggcaaacaaattctcgtccctgatttttcaccaccccctgaccgcgaatggtgagattgagaatataacctttcattcccagcggtcggtcgataaaaaaatcgagataaccgttggcctcaatcggcgttaaacccgccaccagatgggcattaaacgagtatcccggcagcaggggatcattttgcgcttcagccatacttttcatactcccaccattcagagaagaaaccaattgtccatattgcatcagacattgccgtcactgcgtcttttactggctcttctcgctaacccaaccggtaaccccgcttattaaaagcattctgtaacaaagcgggaccaaagccatgacaaaaacgcgtaacaaaagtgtctataatcacggcagaaaagtccacattgattatttgcacggcgtcacactttgctatgccatagcatttttatccataagattagcggatcctacctgacgctttttatcgcaactctctactgtttctccatacccgttttacctgcaggtgcagtaaccataagtgaggtgatctgtggacgttatcttattacaacgcattaagaaccttggtaaattaggcgataaagtatcagttaaagctggttacggccgtaactttcttatccctcaaggtaaagcagttgcagctactgaagctaacactgctgcttttgaagctcgtcgtgctgaacttgagaagcaagaagctgaagtattagctgctgctcaagcacgtgctgaacaattgaatgaagttaacatcgttatcactgctaaagctggtgacgaaggtaaactcttcggttctatcggtactcgtgacatcgctgacgcgttaacgaatgctggtcttacagttgaccgtgcagaagttcgtttaccaaacggtgcgcttcgtcacactggtgaattcaacatcgcaatccaattgcatcatgatgttgttgcagaagttctcgttactatcgtatctgagtaatttctcatcacttaattaacggcactcctcagccaagtcaaaagcctccggtcggaggcttttgactacatgcccatggcgtttacgccccgccctgccactcatcgcagtactgttgtaattcattaagcattctgccgacatggaagccatcacaaacggcatgatgaacctgaatcgccagcggcatcagcaccttgtcgccttgcgtataatatttgcccatagtgaaaacgggggcgaagaagttgtccatattggccacgtttaaatcaaaactggtgaaactcacccagggattggctgagacgaaaaacatattctcaataaaccctttagggaaataggccaggttttcaccgtaacacgccacatcttgcgaatatatgtgtagaaactgccggaaatcgtcgtggtattcactccagagcgatgaaaacgtttcagtttgctcatggaaaacggtgtaacaagggtgaacactatcccatatcaccagctcaccgtctttcattgccatacggaactccggatgagcattcatcaggcgggcaagaatgtgaataaaggccggataaaacttgtgcttatttttctttacggtctttaaaaaggccgtaatatccagctgaacggtctggttataggtacattgagcaactgactgaaatgcctcaaaatgttctttacgatgccattgggatatatcaacggtggtatatccagtgatttttttctccattttagcttccttagctcctgaaaatctcgataactcaaaaaatacgcccggtagtgatcttatttcattatggtgaaagttggaacctcttacgtgccaggccaaataggccgt

SEQ ID NO: 233 - DNA, 4301 bp, Artificial
  Synthetic
tcagatccttccgtatttagccagtatgttctctagtgtggttcgttgtttttgcgtgagccatgagaacgaaccattgagatcatgcttactttgcatgtcactcaaaaattttgcctcaaaactggtgagctgaatttttgcagttaaagcatcgtgtagtgtttttcttagtccgttacgtaggtaggaatctgatgtaatggttgttggtattttgtcaccattcatttttatctggttgttctcaagttcggttacgagatccatttgtctatctagttcaacttggaaaatcaacgtatcagtcgggcggcctcgcttatcaaccaccaatttcatattgctgtaagtgtttaaatctttacttattggtttcaaaacccattggttaagccttttaaactcatggtagttattttcaagcattaacatgaacttaaattcatcaaggctaatctctatatttgccttgtgagttttcttttgtgttagttcttttaataaccactcataaatcctcatagagtatttgttttcaaaagacttaacatgttccagattatattttatgaatttttttaactggaaaagataaggcaatatctcttcactaaaaactaattctaatttttcgcttgagaacttggcatagtttgtccactggaaaatcttaaagcctttaaccaaaggattcctgatttccacagttctcgtcatcagctctctggttgctttagctaatacaccataagcattttccctactgatgttcatcatctgagcgtattggttataagtgaacgataccgtccgttctttccttgtagggttttcaatcgtggggttgagtagtgccacacagcataaaattagcttggtttcatgctccgttaagtcatagcgactaatcgctagttcatttgctttgaaaacaactaattcagacatacatctcaattggtctaggtgattttaatcactataccaattgagatgggctagtcaatgataattactagtccttttcctttgagttgtgggtatctgtaaattctgctagacctttgctggaaaacttgtaaattctgctagaccctctgtaaattccgctagacctttgtgtgttttttttgtttatattcaagtggttataatttatagaataaagaaagaataaaaaaagataaaaagaatagatcccagccctgtgtataactcactactttagtcagttccgcagtattacaaaaggatgtcgcaaacgctgtttgctcctctacaaaacagaccttaaaaccctaaaggcttaagtagcaccctcgcaagctcgggcaaatcgctgaatattccttttgtctccgaccatcaggcacctgagtcgctgtctttttcgtgacattcagttcgctgcgctcacggctctggcagtgaatgggggtaaatggcactacaggcgccttttatggattcatgcaaggaaactacccataatacaagaaaagcccgtcacgggcttctcagggcgttttatggcgggtctgctatgtggtgctatctgactttttgctgttcagcagttcctgccctctgattttccagtctgaccacttcggattatcccgtgacaggtcattcagactggctaatgcacccagtaaggcagcggtatcatcaacaggcttacccgtcttactgtcaagaggacatccggtcaaataaaacgaaaggctcagtcgaaagactgggcctttcgttttgctgaggagacttagggaccctttatgacaacttgacggctacatcattcactttttcttcacaaccggcacggaactcgctcgggctggccccggtgcattttttaaatacccgcgagaaatagagttgatcgtcaaaaccaacattgcgaccgacggtggcgataggcatccgggtggtgctcaaaagcagcttcgcctggctgatacgttggtcctcgcgccagcttaagacgctaatccctaactgctggcggaaaagatgtgacagacgcgacggcgacaagcaaacatgctgtgcgacgctggcgatatcaaaattgctgtctgccaggtgatcgctgatgtactgacaagcctcgcgtacccgattatccatcggtggatggagcgactcgttaatcgcttccatgcgccgcagtaacaattgctcaagcagatttatcgccagcagctccgaatagcgcccttccccttgcccggcgttaatgatttgcccaaacaggtcgctgaaatgcggctggtgcgcttcatccgggcgaaagaaccccgtattggcaaatattgacggccagttaagccattcatgccagtaggcgcgcggacgaaagtaaacccactggtgataccattcgcgagcctccggatgacgaccgtagtgatgaatctctcctggcgggaacagcaaaatatcacccggtcggcaaacaaattctcgtccctgatttttcaccaccccctgaccgcgaatggtgagattgagaatataacctttcattcccagcggtcggtcgataaaaaaatcgagataaccgttggcctcaatcggcgttaaacccgccaccagatgggcattaaacgagtatcccggcagcaggggatcattttgcgcttcagccatacttttcatactcccaccattcagagaagaaaccaattgtccatattgcatcagacattgccgtcactgcgtcttttactggctcttctcgctaacccaaccggtaaccccgcttattaaaagcattctgtaacaaagcgggaccaaagccatgacaaaaacgcgtaacaaaagtgtctataatcacggcagaaaagtccacattgattatttgcacggcgtcacactttgctatgccatagcatttttatccataagattagcggatcctacctgacgctttttatcgcaactctctactgtttctccatacccgttttacctgcaggtgcagtctataataggtagtggtttaatgaaaactctcagcgctaagccagctgaagttcaacatgactggtatgttgttgatgcttctggcaaaactttaggtcgccttgcgactgaaatcgctcgtcgtttacgcggtaagcataaaacttcttatactcctcacgttgacactggcgattacatcgttgtgattaatgctgaacaaattcaagtgactggtaacaaatcacttgataagaaatattatcgccatactggtttccctggtggtatccgtgagactaacttcgagaagttaattgctcacaaacctgaagctgttcttgaaaaagcggttaaaggcatgttaccaaaaggtcctcttggttatgcaatgatcaaaaaaatgaaagtgtacgctggtactgagcatcctcatgctgctcaacagccacaagttttggacatctaagggatacagacttaattaacggcactcctcagccaagtcaaaagcctccggtcggaggcttttgactacatgcccatggcgtttacgccccgccctgccactcatcgcagtactgttgtaattcattaagcattctgccgacatggaagccatcacaaacggcatgatgaacctgaatcgccagcggcatcagcaccttgtcgccttgcgtataatatttgcccatagtgaaaacgggggcgaagaagttgtccatattggccacgtttaaatcaaaactggtgaaactcacccagggattggctgagacgaaaaacatattctcaataaaccctttagggaaataggccaggttttcaccgtaacacgccacatcttgcgaatatatgtgtagaaactgccggaaatcgtcgtggtattcactccagagcgatgaaaacgtttcagtttgctcatggaaaacggtgtaacaagggtgaacactatcccatatcaccagctcaccgtctttcattgccatacggaactccggatgagcattcatcaggcgggcaagaatgtgaataaaggccggataaaacttgtgcttatttttctttacggtctttaaaaaggccgtaatatccagctgaacggtctggttataggtacattgagcaactgactgaaatgcctcaaaatgttctttacgatgccattgggatatatcaacggtggtatatccagtgatttttttctccattttagcttccttagctcctgaaaatctcgataactcaaaaaatacgcccggtagtgatcttatttcattatggtgaaagttggaacctcttacgtgccaggccaaataggccgt

SEQ ID NO: 234 - DNA, 4259 bp, Artificial
  Synthetic
tcagatccttccgtatttagccagtatgttctctagtgtggttcgttgtttttgcgtgagccatgagaacgaaccattgagatcatgcttactttgcatgtcactcaaaaattttgcctcaaaactggtgagctgaatttttgcagttaaagcatcgtgtagtgtttttcttagtccgttacgtaggtaggaatctgatgtaatggttgttggtattttgtcaccattcatttttatctggttgttctcaagttcggttacgagatccatttgtctatctagttcaacttggaaaatcaacgtatcagtcgggcggcctcgcttatcaaccaccaatttcatattgctgtaagtgtttaaatctttacttattggtttcaaaacccattggttaagccttttaaactcatggtagttattttcaagcattaacatgaacttaaattcatcaaggctaatctctatatttgccttgtgagttttcttttgtgttagttcttttaataaccactcataaatcctcatagagtatttgttttcaaaagacttaacatgttccagattatattttatgaatttttttaactggaaaagataaggcaatatctcttcactaaaaactaattctaatttttcgcttgagaacttggcatagtttgtccactggaaaatcttaaagcctttaaccaaaggattcctgatttccacagttctcgtcatcagctctctggttgctttagctaatacaccataagcattttccctactgatgttcatcatctgagcgtattggttataagtgaacgataccgtccgttctttccttgtagggttttcaatcgtggggttgagtagtgccacacagcataaaattagcttggtttcatgctccgttaagtcatagcgactaatcgctagttcatttgctttgaaaacaactaattcagacatacatctcaattggtctaggtgattttaatcactataccaattgagatgggctagtcaatgataattactagtccttttcctttgagttgtgggtatctgtaaattctgctagacctttgctggaaaacttgtaaattctgctagaccctctgtaaattccgctagacctttgtgtgttttttttgtttatattcaagtggttataatttatagaataaagaaagaataaaaaaagataaaaagaatagatcccagccctgtgtataactcactactttagtcagttccgcagtattacaaaaggatgtcgcaaacgctgtttgctcctctacaaaacagaccttaaaaccctaaaggcttaagtagcaccctcgcaagctcgggcaaatcgctgaatattccttttgtctccgaccatcaggcacctgagtcgctgtctttttcgtgacattcagttcgctgcgctcacggctctggcagtgaatgggggtaaatggcactacaggcgccttttatggattcatgcaaggaaactacccataatacaagaaaagcccgtcacgggcttctcagggcgttttatggcgggtctgctatgtggtgctatctgactttttgctgttcagcagttcctgccctctgattttccagtctgaccacttcggattatcccgtgacaggtcattcagactggctaatgcacccagtaaggcagcggtatcatcaacaggcttacccgtcttactgtcaagaggacatccggtcaaataaaacgaaaggctcagtcgaaagactgggcctttcgttttgctgaggagacttagggaccctttatgacaacttgacggctacatcattcactttttcttcacaaccggcacggaactcgctcgggctggccccggtgcattttttaaatacccgcgagaaatagagttgatcgtcaaaaccaacattgcgaccgacggtggcgataggcatccgggtggtgctcaaaagcagcttcgcctggctgatacgttggtcctcgcgccagcttaagacgctaatccctaactgctggcggaaaagatgtgacagacgcgacggcgacaagcaaacatgctgtgcgacgctggcgatatcaaaattgctgtctgccaggtgatcgctgatgtactgacaagcctcgcgtacccgattatccatcggtggatggagcgactcgttaatcgcttccatgcgccgcagtaacaattgctcaagcagatttatcgccagcagctccgaatagcgcccttccccttgcccggcgttaatgatttgcccaaacaggtcgctgaaatgcggctggtgcgcttcatccgggcgaaagaaccccgtattggcaaatattgacggccagttaagccattcatgccagtaggcgcgcggacgaaagtaaacccactggtgataccattcgcgagcctccggatgacgaccgtagtgatgaatctctcctggcgggaacagcaaaatatcacccggtcggcaaacaaattctcgtccctgatttttcaccaccccctgaccgcgaatggtgagattgagaatataacctttcattcccagcggtcggtcgataaaaaaatcgagataaccgttggcctcaatcggcgttaaacccgccaccagatgggcattaaacgagtatcccggcagcaggggatcattttgcgcttcagccatacttttcatactcccaccattcagagaagaaaccaattgtccatattgcatcagacattgccgtcactgcgtcttttactggctcttctcgctaacccaaccggtaaccccgcttattaaaagcattctgtaacaaagcgggaccaaagccatgacaaaaacgcgtaacaaaagtgtctataatcacggcagaaaagtccacattgattatttgcacggcgtcacactttgctatgccatagcatttttatccataagattagcggatcctacctgacgctttttatcgcaactctctactgtttctccatacccgttttacctgcaggtgcagtacatctaagggatacagcacatggctactaattatggtacaggtcgccgtaagaccgcaactgcacgtgttttcttgtcagctggtacaggtaaactcgttattaacaaccgtactttagagcaatatttcggtcgtgaaactgctcgtatggttgttcgtcaacctttagaacttttagaagttactgaaaagtttgacctttacatcactgttaaaggtggtggtatcggtggtcaagctggcgcgatccgtcacggtattactcgtgcgcttatcgctgctgacgaaactttaaaacctgttctacgtcaagctggtttcgttactcgtgatgctcgtgaagttgagcgtaagaaacttggtttacgtaaagctcgtaaacgtcctcaattctctaaacgttaattcgtttacacttaattaacggcactcctcagccaagtcaaaagcctccggtcggaggcttttgactacatgcccatggcgtttacgccccgccctgccactcatcgcagtactgttgtaattcattaagcattctgccgacatggaagccatcacaaacggcatgatgaacctgaatcgccagcggcatcagcaccttgtcgccttgcgtataatatttgcccatagtgaaaacgggggcgaagaagttgtccatattggccacgtttaaatcaaaactggtgaaactcacccagggattggctgagacgaaaaacatattctcaataaaccctttagggaaataggccaggttttcaccgtaacacgccacatcttgcgaatatatgtgtagaaactgccggaaatcgtcgtggtattcactccagagcgatgaaaacgtttcagtttgctcatggaaaacggtgtaacaagggtgaacactatcccatatcaccagctcaccgtctttcattgccatacggaactccggatgagcattcatcaggcgggcaagaatgtgaataaaggccggataaaacttgtgcttatttttctttacggtctttaaaaaggccgtaatatccagctgaacggtctggttataggtacattgagcaactgactgaaatgcctcaaaatgttctttacgatgccattgggatatatcaacggtggtatatccagtgatttttttctccattttagcttccttagctcctgaaaatctcgataactcaaaaaatacgcccggtagtgatcttatttcattatggtgaaagttggaacctcttacgtgccaggccaaataggccgt

SEQ ID NO: 235 - DNA, 4104 bp, Artificial
  Synthetic
tcagatccttccgtatttagccagtatgttctctagtgtggttcgttgtttttgcgtgagccatgagaacgaaccattgagatcatgcttactttgcatgtcactcaaaaattttgcctcaaaactggtgagctgaatttttgcagttaaagcatcgtgtagtgtttttcttagtccgttacgtaggtaggaatctgatgtaatggttgttggtattttgtcaccattcatttttatctggttgttctcaagttcggttacgagatccatttgtctatctagttcaacttggaaaatcaacgtatcagtcgggcggcctcgcttatcaaccaccaatttcatattgctgtaagtgtttaaatctttacttattggtttcaaaacccattggttaagccttttaaactcatggtagttattttcaagcattaacatgaacttaaattcatcaaggctaatctctatatttgccttgtgagttttcttttgtgttagttcttttaataaccactcataaatcctcatagagtatttgttttcaaaagacttaacatgttccagattatattttatgaatttttttaactggaaaagataaggcaatatctcttcactaaaaactaattctaatttttcgcttgagaacttggcatagtttgtccactggaaaatcttaaagcctttaaccaaaggattcctgatttccacagttctcgtcatcagctctctggttgctttagctaatacaccataagcattttccctactgatgttcatcatctgagcgtattggttataagtgaacgataccgtccgttctttccttgtagggttttcaatcgtggggttgagtagtgccacacagcataaaattagcttggtttcatgctccgttaagtcatagcgactaatcgctagttcatttgctttgaaaacaactaattcagacatacatctcaattggtctaggtgattttaatcactataccaattgagatgggctagtcaatgataattactagtccttttcctttgagttgtgggtatctgtaaattctgctagacctttgctggaaaacttgtaaattctgctagaccctctgtaaattccgctagacctttgtgtgttttttttgtttatattcaagtggttataatttatagaataaagaaagaataaaaaaagataaaaagaatagatcccagccctgtgtataactcactactttagtcagttccgcagtattacaaaaggatgtcgcaaacgctgtttgctcctctacaaaacagaccttaaaaccctaaaggcttaagtagcaccctcgcaagctcgggcaaatcgctgaatattccttttgtctccgaccatcaggcacctgagtcgctgtctttttcgtgacattcagttcgctgcgctcacggctctggcagtgaatgggggtaaatggcactacaggcgccttttatggattcatgcaaggaaactacccataatacaagaaaagcccgtcacgggcttctcagggcgttttatggcgggtctgctatgtggtgctatctgactttttgctgttcagcagttcctgccctctgattttccagtctgaccacttcggattatcccgtgacaggtcattcagactggctaatgcacccagtaaggcagcggtatcatcaacaggcttacccgtcttactgtcaagaggacatccggtcaaataaaacgaaaggctcagtcgaaagactgggcctttcgttttgctgaggagacttagggaccctttatgacaacttgacggctacatcattcactttttcttcacaaccggcacggaactcgctcgggctggccccggtgcattttttaaatacccgcgagaaatagagttgatcgtcaaaaccaacattgcgaccgacggtggcgataggcatccgggtggtgctcaaaagcagcttcgcctggctgatacgttggtcctcgcgccagcttaagacgctaatccctaactgctggcggaaaagatgtgacagacgcgacggcgacaagcaaacatgctgtgcgacgctggcgatatcaaaattgctgtctgccaggtgatcgctgatgtactgacaagcctcgcgtacccgattatccatcggtggatggagcgactcgttaatcgcttccatgcgccgcagtaacaattgctcaagcagatttatcgccagcagctccgaatagcgcccttccccttgcccggcgttaatgatttgcccaaacaggtcgctgaaatgcggctggtgcgcttcatccgggcgaaagaaccccgtattggcaaatattgacggccagttaagccattcatgccagtaggcgcgcggacgaaagtaaacccactggtgataccattcgcgagcctccggatgacgaccgtagtgatgaatctctcctggcgggaacagcaaaatatcacccggtcggcaaacaaattctcgtccctgatttttcaccaccccctgaccgcgaatggtgagattgagaatataacctttcattcccagcggtcggtcgataaaaaaatcgagataaccgttggcctcaatcggcgttaaacccgccaccagatgggcattaaacgagtatcccggcagcaggggatcattttgcgcttcagccatacttttcatactcccaccattcagagaagaaaccaattgtccatattgcatcagacattgccgtcactgcgtcttttactggctcttctcgctaacccaaccggtaaccccgcttattaaaagcattctgtaacaaagcgggaccaaagccatgacaaaaacgcgtaacaaaagtgtctataatcacggcagaaaagtccacattgattatttgcacggcgtcacactttgctatgccatagcatttttatccataagattagcggatcctacctgacgctttttatcgcaactctctactgtttctccatacccgttttacctgcaggtgcagtcataatctagaggattttacatgccacaagttaagttgaaagaaggcgaaccagttgacgtagctatccgtcgtttcaaacgttcatgcgaaaaagctggtgttttagctgacgttcgtaagcgcgaattctacgaaaaaccaactcaagaacgtaagcgcaaaaaagctgctgcagttaaacgctaccaaaagaaattggctcgcgaatctgtacgtactactcgcctttactaattaatttgtgattgactgctaacatacttaattaacggcactcctcagccaagtcaaaagcctccggtcggaggcttttgactacatgcccatggcgtttacgccccgccctgccactcatcgcagtactgttgtaattcattaagcattctgccgacatggaagccatcacaaacggcatgatgaacctgaatcgccagcggcatcagcaccttgtcgccttgcgtataatatttgcccatagtgaaaacgggggcgaagaagttgtccatattggccacgtttaaatcaaaactggtgaaactcacccagggattggctgagacgaaaaacatattctcaataaaccctttagggaaataggccaggttttcaccgtaacacgccacatcttgcgaatatatgtgtagaaactgccggaaatcgtcgtggtattcactccagagcgatgaaaacgtttcagtttgctcatggaaaacggtgtaacaagggtgaacactatcccatatcaccagctcaccgtctttcattgccatacggaactccggatgagcattcatcaggcgggcaagaatgtgaataaaggccggataaaacttgtgcttatttttctttacggtctttaaaaaggccgtaatatccagctgaacggtctggttataggtacattgagcaactgactgaaatgcctcaaaatgttctttacgatgccattgggatatatcaacggtggtatatccagtgatttttttctccattttagcttccttagctcctgaaaatctcgataactcaaaaaatacgcccggtagtgatcttatttcattatggtgaaagttggaacctcttacgtgccaggccaaataggccgt

SEQ ID NO: 236 - DNA, 4641 bp, Artificial
  Synthetic
tcagatccttccgtatttagccagtatgttctctagtgtggttcgttgtttttgcgtgagccatgagaacgaaccattgagatcatgcttactttgcatgtcactcaaaaattttgcctcaaaactggtgagctgaatttttgcagttaaagcatcgtgtagtgtttttcttagtccgttacgtaggtaggaatctgatgtaatggttgttggtattttgtcaccattcatttttatctggttgttctcaagttcggttacgagatccatttgtctatctagttcaacttggaaaatcaacgtatcagtcgggcggcctcgcttatcaaccaccaatttcatattgctgtaagtgtttaaatctttacttattggtttcaaaacccattggttaagccttttaaactcatggtagttattttcaagcattaacatgaacttaaattcatcaaggctaatctctatatttgccttgtgagttttcttttgtgttagttcttttaataaccactcataaatcctcatagagtatttgttttcaaaagacttaacatgttccagattatattttatgaatttttttaactggaaaagataaggcaatatctcttcactaaaaactaattctaatttttcgcttgagaacttggcatagtttgtccactggaaaatcttaaagcctttaaccaaaggattcctgatttccacagttctcgtcatcagctctctggttgctttagctaatacaccataagcattttccctactgatgttcatcatctgagcgtattggttataagtgaacgataccgtccgttctttccttgtagggttttcaatcgtggggttgagtagtgccacacagcataaaattagcttggtttcatgctccgttaagtcatagcgactaatcgctagttcatttgctttgaaaacaactaattcagacatacatctcaattggtctaggtgattttaatcactataccaattgagatgggctagtcaatgataattactagtccttttcctttgagttgtgggtatctgtaaattctgctagacctttgctggaaaacttgtaaattctgctagaccctctgtaaattccgctagacctttgtgtgttttttttgtttatattcaagtggttataatttatagaataaagaaagaataaaaaaagataaaaagaatagatcccagccctgtgtataactcactactttagtcagttccgcagtattacaaaaggatgtcgcaaacgctgtttgctcctctacaaaacagaccttaaaaccctaaaggcttaagtagcaccctcgcaagctcgggcaaatcgctgaatattccttttgtctccgaccatcaggcacctgagtcgctgtctttttcgtgacattcagttcgctgcgctcacggctctggcagtgaatgggggtaaatggcactacaggcgccttttatggattcatgcaaggaaactacccataatacaagaaaagcccgtcacgggcttctcagggcgttttatggcgggtctgctatgtggtgctatctgactttttgctgttcagcagttcctgccctctgattttccagtctgaccacttcggattatcccgtgacaggtcattcagactggctaatgcacccagtaaggcagcggtatcatcaacaggcttacccgtcttactgtcaagaggacatccggtcaaataaaacgaaaggctcagtcgaaagactgggcctttcgttttgctgaggagacttagggaccctttatgacaacttgacggctacatcattcactttttcttcacaaccggcacggaactcgctcgggctggccccggtgcattttttaaatacccgcgagaaatagagttgatcgtcaaaaccaacattgcgaccgacggtggcgataggcatccgggtggtgctcaaaagcagcttcgcctggctgatacgttggtcctcgcgccagcttaagacgctaatccctaactgctggcggaaaagatgtgacagacgcgacggcgacaagcaaacatgctgtgcgacgctggcgatatcaaaattgctgtctgccaggtgatcgctgatgtactgacaagcctcgcgtacccgattatccatcggtggatggagcgactcgttaatcgcttccatgcgccgcagtaacaattgctcaagcagatttatcgccagcagctccgaatagcgcccttccccttgcccggcgttaatgatttgcccaaacaggtcgctgaaatgcggctggtgcgcttcatccgggcgaaagaaccccgtattggcaaatattgacggccagttaagccattcatgccagtaggcgcgcggacgaaagtaaacccactggtgataccattcgcgagcctccggatgacgaccgtagtgatgaatctctcctggcgggaacagcaaaatatcacccggtcggcaaacaaattctcgtccctgatttttcaccaccccctgaccgcgaatggtgagattgagaatataacctttcattcccagcggtcggtcgataaaaaaatcgagataaccgttggcctcaatcggcgttaaacccgccaccagatgggcattaaacgagtatcccggcagcaggggatcattttgcgcttcagccatacttttcatactcccaccattcagagaagaaaccaattgtccatattgcatcagacattgccgtcactgcgtcttttactggctcttctcgctaacccaaccggtaaccccgcttattaaaagcattctgtaacaaagcgggaccaaagccatgacaaaaacgcgtaacaaaagtgtctataatcacggcagaaaagtccacattgattatttgcacggcgtcacactttgctatgccatagcatttttatccataagattagcggatcctacctgacgctttttatcgcaactctctactgtttctccatacccgttttacctgcaggtgcagtcaacttttaaggtaaagaaaatggcagattacaacgtaagcatgcgcgaccttcttcaagcaggtgcgcactttggtcaccaaactcgtttctggaacccaaaaatgcgtcaatacatttttggcgcgcgcaacaaaattcacatcatcaaccttgagcacactgttcctgcgttaaatgatgctttgaacttcgctaaccaattagcaagcaaaaagaacaaagttttgttcgttggtacaaaacgtgctgcttctaacatcatccgtgaacaagctcaacgcgctggtcaaccatatgtagaccaccgttggttaggtggtatgttgacgaactggaaaacacttcgccaatctatcaaccgtttaaaagatcttcaaactcaatctcaagacggtacttttgctaagcttactaaacgtgaagctttagaacgtactcgtgagatggaaaaacttgagcgctctttaggcggcgttaaaaacatgggtggtttacctgacgcattatttgtaatcgacgttgatcacgaagcgattgcaattaaagaagctaagaacttaggtattcctgttatcggtatcgttgatacaaactctaacccagataacgttgattacgttattcctggtaacgacgatgcgatccgtgcagtaactttatatgcttcagctatggctgatgcaattcttgctggtaaagaatacgctcaatctcaagcgaacgctcaagcaaaaggcgatgacgctgcgaaagacgcttctgaggcttaatgcgttttgacgcaggcttgtcattacttaattaacggcactcctcagccaagtcaaaagcctccggtcggaggcttttgactacatgcccatggcgtttacgccccgccctgccactcatcgcagtactgttgtaattcattaagcattctgccgacatggaagccatcacaaacggcatgatgaacctgaatcgccagcggcatcagcaccttgtcgccttgcgtataatatttgcccatagtgaaaacgggggcgaagaagttgtccatattggccacgtttaaatcaaaactggtgaaactcacccagggattggctgagacgaaaaacatattctcaataaaccctttagggaaataggccaggttttcaccgtaacacgccacatcttgcgaatatatgtgtagaaactgccggaaatcgtcgtggtattcactccagagcgatgaaaacgtttcagtttgctcatggaaaacggtgtaacaagggtgaacactatcccatatcaccagctcaccgtctttcattgccatacggaactccggatgagcattcatcaggcgggcaagaatgtgaataaaggccggataaaacttgtgcttatttttctttacggtctttaaaaaggccgtaatatccagctgaacggtctggttataggtacattgagcaactgactgaaatgcctcaaaatgttctttacgatgccattgggatatatcaacggtggtatatccagtgatttttttctccattttagcttccttagctcctgaaaatctcgataactcaaaaaatacgcccggtagtgatcttatttcattatggtgaaagttggaacctcttacgtgccaggccaaataggccgt

SEQ ID NO: 237 - DNA, 4412 bp, Artificial
  Synthetic
tcagatccttccgtatttagccagtatgttctctagtgtggttcgttgtttttgcgtgagccatgagaacgaaccattgagatcatgcttactttgcatgtcactcaaaaattttgcctcaaaactggtgagctgaatttttgcagttaaagcatcgtgtagtgtttttcttagtccgttacgtaggtaggaatctgatgtaatggttgttggtattttgtcaccattcatttttatctggttgttctcaagttcggttacgagatccatttgtctatctagttcaacttggaaaatcaacgtatcagtcgggcggcctcgcttatcaaccaccaatttcatattgctgtaagtgtttaaatctttacttattggtttcaaaacccattggttaagccttttaaactcatggtagttattttcaagcattaacatgaacttaaattcatcaaggctaatctctatatttgccttgtgagttttcttttgtgttagttcttttaataaccactcataaatcctcatagagtatttgttttcaaaagacttaacatgttccagattatattttatgaatttttttaactggaaaagataaggcaatatctcttcactaaaaactaattctaatttttcgcttgagaacttggcatagtttgtccactggaaaatcttaaagcctttaaccaaaggattcctgatttccacagttctcgtcatcagctctctggttgctttagctaatacaccataagcattttccctactgatgttcatcatctgagcgtattggttataagtgaacgataccgtccgttctttccttgtagggttttcaatcgtggggttgagtagtgccacacagcataaaattagcttggtttcatgctccgttaagtcatagcgactaatcgctagttcatttgctttgaaaacaactaattcagacatacatctcaattggtctaggtgattttaatcactataccaattgagatgggctagtcaatgataattactagtccttttcctttgagttgtgggtatctgtaaattctgctagacctttgctggaaaacttgtaaattctgctagaccctctgtaaattccgctagacctttgtgtgttttttttgtttatattcaagtggttataatttatagaataaagaaagaataaaaaaagataaaaagaatagatcccagccctgtgtataactcactactttagtcagttccgcagtattacaaaaggatgtcgcaaacgctgtttgctcctctacaaaacagaccttaaaaccctaaaggcttaagtagcaccctcgcaagctcgggcaaatcgctgaatattccttttgtctccgaccatcaggcacctgagtcgctgtctttttcgtgacattcagttcgctgcgctcacggctctggcagtgaatgggggtaaatggcactacaggcgccttttatggattcatgcaaggaaactacccataatacaagaaaagcccgtcacgggcttctcagggcgttttatggcgggtctgctatgtggtgctatctgactttttgctgttcagcagttcctgccctctgattttccagtctgaccacttcggattatcccgtgacaggtcattcagactggctaatgcacccagtaaggcagcggtatcatcaacaggcttacccgtcttactgtcaagaggacatccggtcaaataaaacgaaaggctcagtcgaaagactgggcctttcgttttgctgaggagacttagggaccctttatgacaacttgacggctacatcattcactttttcttcacaaccggcacggaactcgctcgggctggccccggtgcattttttaaatacccgcgagaaatagagttgatcgtcaaaaccaacattgcgaccgacggtggcgataggcatccgggtggtgctcaaaagcagcttcgcctggctgatacgttggtcctcgcgccagcttaagacgctaatccctaactgctggcggaaaagatgtgacagacgcgacggcgacaagcaaacatgctgtgcgacgctggcgatatcaaaattgctgtctgccaggtgatcgctgatgtactgacaagcctcgcgtacccgattatccatcggtggatggagcgactcgttaatcgcttccatgcgccgcagtaacaattgctcaagcagatttatcgccagcagctccgaatagcgcccttccccttgcccggcgttaatgatttgcccaaacaggtcgctgaaatgcggctggtgcgcttcatccgggcgaaagaaccccgtattggcaaatattgacggccagttaagccattcatgccagtaggcgcgcggacgaaagtaaacccactggtgataccattcgcgagcctccggatgacgaccgtagtgatgaatctctcctggcgggaacagcaaaatatcacccggtcggcaaacaaattctcgtccctgatttttcaccaccccctgaccgcgaatggtgagattgagaatataacctttcattcccagcggtcggtcgataaaaaaatcgagataaccgttggcctcaatcggcgttaaacccgccaccagatgggcattaaacgagtatcccggcagcaggggatcattttgcgcttcagccatacttttcatactcccaccattcagagaagaaaccaattgtccatattgcatcagacattgccgtcactgcgtcttttactggctcttctcgctaacccaaccggtaaccccgcttattaaaagcattctgtaacaaagcgggaccaaagccatgacaaaaacgcgtaacaaaagtgtctataatcacggcagaaaagtccacattgattatttgcacggcgtcacactttgctatgccatagcatttttatccataagattagcggatcctacctgacgctttttatcgcaactctctactgtttctccatacccgttttacctgcaggtgcagtacacatttgggagttggaccttggctaatatcaaatcagctaagaagcgcgccattcagtctgaaaaggctcgtaagcacaacgcaagccgtcgctctatgatgcgtactttcatcaagaaagtatacgcagctatcgaagctggcgacaaagctgctgcacagaaagcatttaacgaaatgcaaccgatcgtggaccgtcaggctgctaaaggtctgatccacaaaaacaaagctgcacgtcataaggctaacctgactgcacagatcaacaaactggcttaatcgccaattattcacacaagaggatgttatggtaactattcgtttagcacgtcacggcgctaaaaagcgtccgttctaccaggttgttgtcgctgacagccgtaatgcacgcaacggtcgcttcatcgagcgcgttggtttcttcaacccaatcgctagcgaaaaagaagaaggcactcgcctggatctggatcgcatcgctcactgggttggccagggcgcaactatttctgatcgcgttgctgcgctgatcaaagaagtaaacaaagcagcttaatctgtcacacttaattaacggcactcctcagccaagtcaaaagcctccggtcggaggcttttgactacatgcccatggcgtttacgccccgccctgccactcatcgcagtactgttgtaattcattaagcattctgccgacatggaagccatcacaaacggcatgatgaacctgaatcgccagcggcatcagcaccttgtcgccttgcgtataatatttgcccatagtgaaaacgggggcgaagaagttgtccatattggccacgtttaaatcaaaactggtgaaactcacccagggattggctgagacgaaaaacatattctcaataaaccctttagggaaataggccaggttttcaccgtaacacgccacatcttgcgaatatatgtgtagaaactgccggaaatcgtcgtggtattcactccagagcgatgaaaacgtttcagtttgctcatggaaaacggtgtaacaagggtgaacactatcccatatcaccagctcaccgtctttcattgccatacggaactccggatgagcattcatcaggcgggcaagaatgtgaataaaggccggataaaacttgtgcttatttttctttacggtctttaaaaaggccgtaatatccagctgaacggtctggttataggtacattgagcaactgactgaaatgcctcaaaatgttctttacgatgccattgggatatatcaacggtggtatatccagtgatttttttctccattttagcttccttagctcctgaaaatctcgataactcaaaaaatacgcccggtagtgatcttatttcattatggtgaaagttggaacctcttacgtgccaggccaaataggccgt

SEQ ID NO: 238 - DNA, 6452 bp, Artificial
  Synthetic
tcagatccttccgtatttagccagtatgttctctagtgtggttcgttgtttttgcgtgagccatgagaacgaaccattgagatcatgcttactttgcatgtcactcaaaaattttgcctcaaaactggtgagctgaatttttgcagttaaagcatcgtgtagtgtttttcttagtccgttacgtaggtaggaatctgatgtaatggttgttggtattttgtcaccattcatttttatctggttgttctcaagttcggttacgagatccatttgtctatctagttcaacttggaaaatcaacgtatcagtcgggcggcctcgcttatcaaccaccaatttcatattgctgtaagtgtttaaatctttacttattggtttcaaaacccattggttaagccttttaaactcatggtagttattttcaagcattaacatgaacttaaattcatcaaggctaatctctatatttgccttgtgagttttcttttgtgttagttcttttaataaccactcataaatcctcatagagtatttgttttcaaaagacttaacatgttccagattatattttatgaatttttttaactggaaaagataaggcaatatctcttcactaaaaactaattctaatttttcgcttgagaacttggcatagtttgtccactggaaaatcttaaagcctttaaccaaaggattcctgatttccacagttctcgtcatcagctctctggttgctttagctaatacaccataagcattttccctactgatgttcatcatctgagcgtattggttataagtgaacgataccgtccgttctttccttgtagggttttcaatcgtggggttgagtagtgccacacagcataaaattagcttggtttcatgctccgttaagtcatagcgactaatcgctagttcatttgctttgaaaacaactaattcagacatacatctcaattggtctaggtgattttaatcactataccaattgagatgggctagtcaatgataattactagtccttttcctttgagttgtgggtatctgtaaattctgctagacctttgctggaaaacttgtaaattctgctagaccctctgtaaattccgctagacctttgtgtgttttttttgtttatattcaagtggttataatttatagaataaagaaagaataaaaaaagataaaaagaatagatcccagccctgtgtataactcactactttagtcagttccgcagtattacaaaaggatgtcgcaaacgctgtttgctcctctacaaaacagaccttaaaaccctaaaggcttaagtagcaccctcgcaagctcgggcaaatcgctgaatattccttttgtctccgaccatcaggcacctgagtcgctgtctttttcgtgacattcagttcgctgcgctcacggctctggcagtgaatgggggtaaatggcactacaggcgccttttatggattcatgcaaggaaactacccataatacaagaaaagcccgtcacgggcttctcagggcgttttatggcgggtctgctatgtggtgctatctgactttttgctgttcagcagttcctgccctctgattttccagtctgaccacttcggattatcccgtgacaggtcattcagactggctaatgcacccagtaaggcagcggtatcatcaacaggcttacccgtcttactgtcaagaggacatccggtcaaataaaacgaaaggctcagtcgaaagactgggcctttcgttttgctgaggagacttagggaccctttatgacaacttgacggctacatcattcactttttcttcacaaccggcacggaactcgctcgggctggccccggtgcattttttaaatacccgcgagaaatagagttgatcgtcaaaaccaacattgcgaccgacggtggcgataggcatccgggtggtgctcaaaagcagcttcgcctggctgatacgttggtcctcgcgccagcttaagacgctaatccctaactgctggcggaaaagatgtgacagacgcgacggcgacaagcaaacatgctgtgcgacgctggcgatatcaaaattgctgtctgccaggtgatcgctgatgtactgacaagcctcgcgtacccgattatccatcggtggatggagcgactcgttaatcgcttccatgcgccgcagtaacaattgctcaagcagatttatcgccagcagctccgaatagcgcccttccccttgcccggcgttaatgatttgcccaaacaggtcgctgaaatgcggctggtgcgcttcatccgggcgaaagaaccccgtattggcaaatattgacggccagttaagccattcatgccagtaggcgcgcggacgaaagtaaacccactggtgataccattcgcgagcctccggatgacgaccgtagtgatgaatctctcctggcgggaacagcaaaatatcacccggtcggcaaacaaattctcgtccctgatttttcaccaccccctgaccgcgaatggtgagattgagaatataacctttcattcccagcggtcggtcgataaaaaaatcgagataaccgttggcctcaatcggcgttaaacccgccaccagatgggcattaaacgagtatcccggcagcaggggatcattttgcgcttcagccatacttttcatactcccaccattcagagaagaaaccaattgtccatattgcatcagacattgccgtcactgcgtcttttactggctcttctcgctaacccaaccggtaaccccgcttattaaaagcattctgtaacaaagcgggaccaaagccatgacaaaaacgcgtaacaaaagtgtctataatcacggcagaaaagtccacattgattatttgcacggcgtcacactttgctatgccatagcatttttatccataagattagcggatcctacctgacgctttttatcgcaactctctactgtttctccatacccgttttacctgcaggtgcagttattttcaaggagtgcaagagtggcaaactctgctcaagctaaaaaacgtgcgcgccaaaacgttaaagcgcgtaaacacaacgcaagcttgcgttctatggttcgtacttacatcaaacgtactttaagtgcaatcgctggtggtgattatgctgttgctacagaagcttacaaaaaagctgttcctgtaatcgaccgcatggctgataaaggcatcatccacaaaaataaagctgctcgtcataagagccgtttaaatgctcaagttaaagctttagctaactaattgaagcaagaattataaggcttttatcatggttgttattcgtttagcacgtggcggcgcaaaaaaacgtccattctatcaaatcgttgtgactgatagccgcaatgcacgtgatggtcgtttcatcgagcgtatcggtttctttaacccaactgcacaaggtcaagcagaaaaacttcgtttagacgcagaccgttttgctcactgggtttctcaaggtgctcaaccttctgaacgtgttgcttctttggctgctcaagctaaaaaagctactgcataattattgtactgactttatcaggtatatcatgaccgaatcttttgcagccctctttgaagaaagtgaattaaacctcaacgttgaaaagggtgcagtcatccaaggtgttgttgtaaacatcgatagcgactgggttactgttgacactggccttaaatcagaaggcattgttgaccgtgctgaatttttaaatgaacaacgtgaacttgaagttcaggttggtgacactgttgacgtagttgttgaagctcttgacaacggtatgggtcaaacagttttatcacgtgaaaaagctaaacgtgctgaaacttggactaaacttgaaaaaatctttgaagatggcgaaatcgttactggtgttatctctggtaaagttaaaggcggtttcactgttgacatcggtcctgttcgtgcgttcttaccaggttcattagttgacactcgtcctatccgtgacactactcaccttgaaggtaaagagttagagtttaaagtaatcaaacttgatgctaaacgtaacaacgttgttgtatctcgtcgtgctgttatggaagctgaatcttctgctgaccgtgaagcattacttgctcaacttgaagaaggtcaaacagttacaggtactatcaagaaccttactgattacggtgcattcgttgatcttggcggtattgatggtcttcttcatatcacagatatggcttggaagcgtatcaagcacccttcagaagttgttgaagttggtcaagaagttactgttaaagtacttaaatttgaccgtgaacgtaaccgcgtatctttaggccttaaacaattaggcgaagatccatggttagcgatcatgagccgttaccctaaaggttctatcgttaaagcacgtgttactaacttaactgactacggttgtttcgctgaaatcgctgaaggcgttgaaggtttagtacacgtttctgaaatggaccacactaacaaaaacatccacccatctaaagttgttcagatcggtgacgaagttgatgttatggttcttgaagttgacgaagaacgtcgtcgtatcagccttggtatcaaacaaactcgtgctaacccatgggaagagtttgctaagtctcatgagaaaggcgaaaaagtttcaggcacaatcaagtctatcactgactttggtatcttcattggtttaaatggcggtatcgacggtctagttcacttgtctgatatttcttggaacgaacaaggcgaagaagctatccgtcgttacaagaaaggtgacactgttgaagcagttatcttgtctgtagacgctgaaggtaaccgtatcagccttggtatcaagcaattgaacagcgatccgttcaatgatttcttagctgctaacgaacgtggtgctttagttaaaggtactgtgactgcagttgatgctcgtggcgcaactgttaagttagctgacgaagtagaagctactcttaaagcttctgaaatcaaccgtgaccgcgttgaagatgcaactaaattcttagaagttggtcaagaagttgaagctaaaatcatcaacgttgatcgtaaatctcgctctatcaacttgtctatcaaagcgaaagacgaagctgaagagaaagaagcagtagctaacttacgtacagcatcagcttctcaagaaaatggtcctaagactattggtgacttgatcaaagcgcaaatgaagtaataagttaacaaagtacagtttcatgtttttaagcatctcggagaaatcgaatggctttaactaatgcagaccgcgcagagatcattgctaaatttgctcgcgctgaaaacgacactggttcaccagaagtacaagtagctttattgactgctcaaatcaatgatttacaaggtcactttaaagctcacaaacacgaccaccatagccgtcgcggtttgatccgtatggttaaccaacgtcgtaaattacttgactacttaaatggtaaagaccacgagcgttacactgctttgatcggtgctttaggtctacgtcgttaattcgattttgctttgttttcacttaattaacggcactcctcagccaagtcaaaagcctccggtcggaggcttttgactacatgcccatggcgtttacgccccgccctgccactcatcgcagtactgttgtaattcattaagcattctgccgacatggaagccatcacaaacggcatgatgaacctgaatcgccagcggcatcagcaccttgtcgccttgcgtataatatttgcccatagtgaaaacgggggcgaagaagttgtccatattggccacgtttaaatcaaaactggtgaaactcacccagggattggctgagacgaaaaacatattctcaataaaccctttagggaaataggccaggttttcaccgtaacacgccacatcttgcgaatatatgtgtagaaactgccggaaatcgtcgtggtattcactccagagcgatgaaaacgtttcagtttgctcatggaaaacggtgtaacaagggtgaacactatcccatatcaccagctcaccgtctttcattgccatacggaactccggatgagcattcatcaggcgggcaagaatgtgaataaaggccggataaaacttgtgcttatttttctttacggtctttaaaaaggccgtaatatccagctgaacggtctggttataggtacattgagcaactgactgaaatgcctcaaaatgttctttacgatgccattgggatatatcaacggtggtatatccagtgatttttttctccattttagcttccttagctcctgaaaatctcgataactcaaaaaatacgcccggtagtgatcttatttcattatggtgaaagttggaacctcttacgtgccaggccaaataggccgt

SEQ ID NO: 239 - DNA, 4418 bp, Artificial
  Synthetic
tcagatccttccgtatttagccagtatgttctctagtgtggttcgttgtttttgcgtgagccatgagaacgaaccattgagatcatgcttactttgcatgtcactcaaaaattttgcctcaaaactggtgagctgaatttttgcagttaaagcatcgtgtagtgtttttcttagtccgttacgtaggtaggaatctgatgtaatggttgttggtattttgtcaccattcatttttatctggttgttctcaagttcggttacgagatccatttgtctatctagttcaacttggaaaatcaacgtatcagtcgggcggcctcgcttatcaaccaccaatttcatattgctgtaagtgtttaaatctttacttattggtttcaaaacccattggttaagccttttaaactcatggtagttattttcaagcattaacatgaacttaaattcatcaaggctaatctctatatttgccttgtgagttttcttttgtgttagttcttttaataaccactcataaatcctcatagagtatttgttttcaaaagacttaacatgttccagattatattttatgaatttttttaactggaaaagataaggcaatatctcttcactaaaaactaattctaatttttcgcttgagaacttggcatagtttgtccactggaaaatcttaaagcctttaaccaaaggattcctgatttccacagttctcgtcatcagctctctggttgctttagctaatacaccataagcattttccctactgatgttcatcatctgagcgtattggttataagtgaacgataccgtccgttctttccttgtagggttttcaatcgtggggttgagtagtgccacacagcataaaattagcttggtttcatgctccgttaagtcatagcgactaatcgctagttcatttgctttgaaaacaactaattcagacatacatctcaattggtctaggtgattttaatcactataccaattgagatgggctagtcaatgataattactagtccttttcctttgagttgtgggtatctgtaaattctgctagacctttgctggaaaacttgtaaattctgctagaccctctgtaaattccgctagacctttgtgtgttttttttgtttatattcaagtggttataatttatagaataaagaaagaataaaaaaagataaaaagaatagatcccagccctgtgtataactcactactttagtcagttccgcagtattacaaaaggatgtcgcaaacgctgtttgctcctctacaaaacagaccttaaaaccctaaaggcttaagtagcaccctcgcaagctcgggcaaatcgctgaatattccttttgtctccgaccatcaggcacctgagtcgctgtctttttcgtgacattcagttcgctgcgctcacggctctggcagtgaatgggggtaaatggcactacaggcgccttttatggattcatgcaaggaaactacccataatacaagaaaagcccgtcacgggcttctcagggcgttttatggcgggtctgctatgtggtgctatctgactttttgctgttcagcagttcctgccctctgattttccagtctgaccacttcggattatcccgtgacaggtcattcagactggctaatgcacccagtaaggcagcggtatcatcaacaggcttacccgtcttactgtcaagaggacatccggtcaaataaaacgaaaggctcagtcgaaagactgggcctttcgttttgctgaggagacttagggaccctttatgacaacttgacggctacatcattcactttttcttcacaaccggcacggaactcgctcgggctggccccggtgcattttttaaatacccgcgagaaatagagttgatcgtcaaaaccaacattgcgaccgacggtggcgataggcatccgggtggtgctcaaaagcagcttcgcctggctgatacgttggtcctcgcgccagcttaagacgctaatccctaactgctggcggaaaagatgtgacagacgcgacggcgacaagcaaacatgctgtgcgacgctggcgatatcaaaattgctgtctgccaggtgatcgctgatgtactgacaagcctcgcgtacccgattatccatcggtggatggagcgactcgttaatcgcttccatgcgccgcagtaacaattgctcaagcagatttatcgccagcagctccgaatagcgcccttccccttgcccggcgttaatgatttgcccaaacaggtcgctgaaatgcggctggtgcgcttcatccgggcgaaagaaccccgtattggcaaatattgacggccagttaagccattcatgccagtaggcgcgcggacgaaagtaaacccactggtgataccattcgcgagcctccggatgacgaccgtagtgatgaatctctcctggcgggaacagcaaaatatcacccggtcggcaaacaaattctcgtccctgatttttcaccaccccctgaccgcgaatggtgagattgagaatataacctttcattcccagcggtcggtcgataaaaaaatcgagataaccgttggcctcaatcggcgttaaacccgccaccagatgggcattaaacgagtatcccggcagcaggggatcattttgcgcttcagccatacttttcatactcccaccattcagagaagaaaccaattgtccatattgcatcagacattgccgtcactgcgtcttttactggctcttctcgctaacccaaccggtaaccccgcttattaaaagcattctgtaacaaagcgggaccaaagccatgacaaaaacgcgtaacaaaagtgtctataatcacggcagaaaagtccacattgattatttgcacggcgtcacactttgctatgccatagcatttttatccataagattagcggatcctacctgacgctttttatcgcaactctctactgtttctccatacccgttttacctgcaggtgcagttattttcaaggagtgcaagagtggcaaactctgctcaagctaaaaaacgtgcgcgccaaaacgttaaagcgcgtaaacacaacgcaagcttgcgttctatggttcgtacttacatcaaacgtactttaagtgcaatcgctggtggtgattatgctgttgctacagaagcttacaaaaaagctgttcctgtaatcgaccgcatggctgataaaggcatcatccacaaaaataaagctgctcgtcataagagccgtttaaatgctcaagttaaagctttagctaactaattgaagcaagaattataaggcttttatcatggttgttattcgtttagcacgtggcggcgcaaaaaaacgtccattctatcaaatcgttgtgactgatagccgcaatgcacgtgatggtcgtttcatcgagcgtatcggtttctttaacccaactgcacaaggtcaagcagaaaaacttcgtttagacgcagaccgttttgctcactgggtttctcaaggtgctcaaccttctgaacgtgttgcttctttggctgctcaagctaaaaaagctactgcataattattgtaacttaattaacggcactcctcagccaagtcaaaagcctccggtcggaggcttttgactacatgcccatggcgtttacgccccgccctgccactcatcgcagtactgttgtaattcattaagcattctgccgacatggaagccatcacaaacggcatgatgaacctgaatcgccagcggcatcagcaccttgtcgccttgcgtataatatttgcccatagtgaaaacgggggcgaagaagttgtccatattggccacgtttaaatcaaaactggtgaaactcacccagggattggctgagacgaaaaacatattctcaataaaccctttagggaaataggccaggttttcaccgtaacacgccacatcttgcgaatatatgtgtagaaactgccggaaatcgtcgtggtattcactccagagcgatgaaaacgtttcagtttgctcatggaaaacggtgtaacaagggtgaacactatcccatatcaccagctcaccgtctttcattgccatacggaactccggatgagcattcatcaggcgggcaagaatgtgaataaaggccggataaaacttgtgcttatttttctttacggtctttaaaaaggccgtaatatccagctgaacggtctggttataggtacattgagcaactgactgaaatgcctcaaaatgttctttacgatgccattgggatatatcaacggtggtatatccagtgatttttttctccattttagcttccttagctcctgaaaatctcgataactcaaaaaatacgcccggtagtgatcttatttcattatggtgaaagttggaacctcttacgtgccaggccaaataggccgt

SEQ ID NO: 240 - DNA, 4144 bp, Artificial
  Synthetic
tcagatccttccgtatttagccagtatgttctctagtgtggttcgttgtttttgcgtgagccatgagaacgaaccattgagatcatgcttactttgcatgtcactcaaaaattttgcctcaaaactggtgagctgaatttttgcagttaaagcatcgtgtagtgtttttcttagtccgttacgtaggtaggaatctgatgtaatggttgttggtattttgtcaccattcatttttatctggttgttctcaagttcggttacgagatccatttgtctatctagttcaacttggaaaatcaacgtatcagtcgggcggcctcgcttatcaaccaccaatttcatattgctgtaagtgtttaaatctttacttattggtttcaaaacccattggttaagccttttaaactcatggtagttattttcaagcattaacatgaacttaaattcatcaaggctaatctctatatttgccttgtgagttttcttttgtgttagttcttttaataaccactcataaatcctcatagagtatttgttttcaaaagacttaacatgttccagattatattttatgaatttttttaactggaaaagataaggcaatatctcttcactaaaaactaattctaatttttcgcttgagaacttggcatagtttgtccactggaaaatcttaaagcctttaaccaaaggattcctgatttccacagttctcgtcatcagctctctggttgctttagctaatacaccataagcattttccctactgatgttcatcatctgagcgtattggttataagtgaacgataccgtccgttctttccttgtagggttttcaatcgtggggttgagtagtgccacacagcataaaattagcttggtttcatgctccgttaagtcatagcgactaatcgctagttcatttgctttgaaaacaactaattcagacatacatctcaattggtctaggtgattttaatcactataccaattgagatgggctagtcaatgataattactagtccttttcctttgagttgtgggtatctgtaaattctgctagacctttgctggaaaacttgtaaattctgctagaccctctgtaaattccgctagacctttgtgtgttttttttgtttatattcaagtggttataatttatagaataaagaaagaataaaaaaagataaaaagaatagatcccagccctgtgtataactcactactttagtcagttccgcagtattacaaaaggatgtcgcaaacgctgtttgctcctctacaaaacagaccttaaaaccctaaaggcttaagtagcaccctcgcaagctcgggcaaatcgctgaatattccttttgtctccgaccatcaggcacctgagtcgctgtctttttcgtgacattcagttcgctgcgctcacggctctggcagtgaatgggggtaaatggcactacaggcgccttttatggattcatgcaaggaaactacccataatacaagaaaagcccgtcacgggcttctcagggcgttttatggcgggtctgctatgtggtgctatctgactttttgctgttcagcagttcctgccctctgattttccagtctgaccacttcggattatcccgtgacaggtcattcagactggctaatgcacccagtaaggcagcggtatcatcaacaggcttacccgtcttactgtcaagaggacatccggtcaaataaaacgaaaggctcagtcgaaagactgggcctttcgttttgctgaggagacttagggaccctttatgacaacttgacggctacatcattcactttttcttcacaaccggcacggaactcgctcgggctggccccggtgcattttttaaatacccgcgagaaatagagttgatcgtcaaaaccaacattgcgaccgacggtggcgataggcatccgggtggtgctcaaaagcagcttcgcctggctgatacgttggtcctcgcgccagcttaagacgctaatccctaactgctggcggaaaagatgtgacagacgcgacggcgacaagcaaacatgctgtgcgacgctggcgatatcaaaattgctgtctgccaggtgatcgctgatgtactgacaagcctcgcgtacccgattatccatcggtggatggagcgactcgttaatcgcttccatgcgccgcagtaacaattgctcaagcagatttatcgccagcagctccgaatagcgcccttccccttgcccggcgttaatgatttgcccaaacaggtcgctgaaatgcggctggtgcgcttcatccgggcgaaagaaccccgtattggcaaatattgacggccagttaagccattcatgccagtaggcgcgcggacgaaagtaaacccactggtgataccattcgcgagcctccggatgacgaccgtagtgatgaatctctcctggcgggaacagcaaaatatcacccggtcggcaaacaaattctcgtccctgatttttcaccaccccctgaccgcgaatggtgagattgagaatataacctttcattcccagcggtcggtcgataaaaaaatcgagataaccgttggcctcaatcggcgttaaacccgccaccagatgggcattaaacgagtatcccggcagcaggggatcattttgcgcttcagccatacttttcatactcccaccattcagagaagaaaccaattgtccatattgcatcagacattgccgtcactgcgtcttttactggctcttctcgctaacccaaccggtaaccccgcttattaaaagcattctgtaacaaagcgggaccaaagccatgacaaaaacgcgtaacaaaagtgtctataatcacggcagaaaagtccacattgattatttgcacggcgtcacactttgctatgccatagcatttttatccataagattagcggatcctacctgacgctttttatcgcaactctctactgtttctccatacccgttttacctgcaggtgcagtggacaggataaggaaccgtcatggctaactccgcacaagcacgcaagcgcgcccgccaggccgcgaaggcaaactcgcacaactcggcgctgcgctcgaaattccgtaccgcgatcaagtcggttcgcaaggctgttgaagccggcgaccaggcaaaggctgccgagctgttcaaggctgccgtgaagacgatcgacacgatcgccgacaagaagatcgttcacaagaacaaggccgctcgcagcaagagccgcctggccgcagccgtcaagggcctgcaggcagcagcgtaactccggtgacttaattaacggcactcctcagccaagtcaaaagcctccggtcggaggcttttgactacatgcccatggcgtttacgccccgccctgccactcatcgcagtactgttgtaattcattaagcattctgccgacatggaagccatcacaaacggcatgatgaacctgaatcgccagcggcatcagcaccttgtcgccttgcgtataatatttgcccatagtgaaaacgggggcgaagaagttgtccatattggccacgtttaaatcaaaactggtgaaactcacccagggattggctgagacgaaaaacatattctcaataaaccctttagggaaataggccaggttttcaccgtaacacgccacatcttgcgaatatatgtgtagaaactgccggaaatcgtcgtggtattcactccagagcgatgaaaacgtttcagtttgctcatggaaaacggtgtaacaagggtgaacactatcccatatcaccagctcaccgtctttcattgccatacggaactccggatgagcattcatcaggcgggcaagaatgtgaataaaggccggataaaacttgtgcttatttttctttacggtctttaaaaaggccgtaatatccagctgaacggtctggttataggtacattgagcaactgactgaaatgcctcaaaatgttctttacgatgccattgggatatatcaacggtggtatatccagtgatttttttctccattttagcttccttagctcctgaaaatctcgataactcaaaaaatacgcccggtagtgatcttatttcattatggtgaaagttggaacctcttacgtgccaagccaaataggccgt

SEQ ID NO: 241 - DNA, 4427 bp, Artificial
  Synthetic
tcagatccttccgtatttagccagtatgttctctagtgtggttcgttgtttttgcgtgagccatgagaacgaaccattgagatcatgcttactttgcatgtcactcaaaaattttgcctcaaaactggtgagctgaatttttgcagttaaagcatcgtgtagtgtttttcttagtccgttacgtaggtaggaatctgatgtaatggttgttggtattttgtcaccattcatttttatctggttgttctcaagttcggttacgagatccatttgtctatctagttcaacttggaaaatcaacgtatcagtcgggcggcctcgcttatcaaccaccaatttcatattgctgtaagtgtttaaatctttacttattggtttcaaaacccattggttaagccttttaaactcatggtagttattttcaagcattaacatgaacttaaattcatcaaggctaatctctatatttgccttgtgagttttcttttgtgttagttcttttaataaccactcataaatcctcatagagtatttgttttcaaaagacttaacatgttccagattatattttatgaatttttttaactggaaaagataaggcaatatctcttcactaaaaactaattctaatttttcgcttgagaacttggcatagtttgtccactggaaaatcttaaagcctttaaccaaaggattcctgatttccacagttctcgtcatcagctctctggttgctttagctaatacaccataagcattttccctactgatgttcatcatctgagcgtattggttataagtgaacgataccgtccgttctttccttgtagggttttcaatcgtggggttgagtagtgccacacagcataaaattagcttggtttcatgctccgttaagtcatagcgactaatcgctagttcatttgctttgaaaacaactaattcagacatacatctcaattggtctaggtgattttaatcactataccaattgagatgggctagtcaatgataattactagtccttttcctttgagttgtgggtatctgtaaattctgctagacctttgctggaaaacttgtaaattctgctagaccctctgtaaattccgctagacctttgtgtgttttttttgtttatattcaagtggttataatttatagaataaagaaagaataaaaaaagataaaaagaatagatcccagccctgtgtataactcactactttagtcagttccgcagtattacaaaaggatgtcgcaaacgctgtttgctcctctacaaaacagaccttaaaaccctaaaggcttaagtagcaccctcgcaagctcgggcaaatcgctgaatattccttttgtctccgaccatcaggcacctgagtcgctgtctttttcgtgacattcagttcgctgcgctcacggctctggcagtgaatgggggtaaatggcactacaggcgccttttatggattcatgcaaggaaactacccataatacaagaaaagcccgtcacgggcttctcagggcgttttatggcgggtctgctatgtggtgctatctgactttttgctgttcagcagttcctgccctctgattttccagtctgaccacttcggattatcccgtgacaggtcattcagactggctaatgcacccagtaaggcagcggtatcatcaacaggcttacccgtcttactgtcaagaggacatccggtcaaataaaacgaaaggctcagtcgaaagactgggcctttcgttttgctgaggagacttagggaccctttatgacaacttgacggctacatcattcactttttcttcacaaccggcacggaactcgctcgggctggccccggtgcattttttaaatacccgcgagaaatagagttgatcgtcaaaaccaacattgcgaccgacggtggcgataggcatccgggtggtgctcaaaagcagcttcgcctggctgatacgttggtcctcgcgccagcttaagacgctaatccctaactgctggcggaaaagatgtgacagacgcgacggcgacaagcaaacatgctgtgcgacgctggcgatatcaaaattgctgtctgccaggtgatcgctgatgtactgacaagcctcgcgtacccgattatccatcggtggatggagcgactcgttaatcgcttccatgcgccgcagtaacaattgctcaagcagatttatcgccagcagctccgaatagcgcccttccccttgcccggcgttaatgatttgcccaaacaggtcgctgaaatgcggctggtgcgcttcatccgggcgaaagaaccccgtattggcaaatattgacggccagttaagccattcatgccagtaggcgcgcggacgaaagtaaacccactggtgataccattcgcgagcctccggatgacgaccgtagtgatgaatctctcctggcgggaacagcaaaatatcacccggtcggcaaacaaattctcgtccctgatttttcaccaccccctgaccgcgaatggtgagattgagaatataacctttcattcccagcggtcggtcgataaaaaaatcgagataaccgttggcctcaatcggcgttaaacccgccaccagatgggcattaaacgagtatcccggcagcaggggatcattttgcgcttcagccatacttttcatactcccaccattcagagaagaaaccaattgtccatattgcatcagacattgccgtcactgcgtcttttactggctcttctcgctaacccaaccggtaaccccgcttattaaaagcattctgtaacaaagcgggaccaaagccatgacaaaaacgcgtaacaaaagtgtctataatcacggcagaaaagtccacattgattatttgcacggcgtcacactttgctatgccatagcatttttatccataagattagcggatcctacctgacgctttttatcgcaactctctactgtttctccatacccgttttacctgcaggtgcagtggacaggataaggaaccgtcatggctaactccgcacaagcacgcaagcgcgcccgccaggccgcgaaggcaaactcgcacaactcggcgctgcgctcgaaattccgtaccgcgatcaagtcggttcgcaaggctgttgaagccggcgaccaggcaaaggctgccgagctgttcaaggctgccgtgaagacgatcgacacgatcgccgacaagaagatcgttcacaagaacaaggccgctcgcagcaagagccgcctggccgcagccgtcaagggcctgcaggcagcagcgtaactccggtggttttcccgaaggacatcatatggttatcatccgtctggctcgtggcggctcgaagaagcgcccgttctacaacatcgttgctaccgattcgcgcaaccgtcgtgacggccgcttcatcgagcgcgtcggcttctacaacccggtcgccacgaagggcgaatcgctgcgtatcgctcaggatcgcctgacgtactggcaaggcgttggcgcgcaactgtcgccgaccgtccagcgtctcgtgaaggaagcgcaaaaggcgcaaccggctgcctaacatggcacacttaattaacggcactcctcagccaagtcaaaagcctccggtcggaggcttttgactacatgcccatggcgtttacgccccgccctgccactcatcgcagtactgttgtaattcattaagcattctgccgacatggaagccatcacaaacggcatgatgaacctgaatcgccagcggcatcagcaccttgtcgccttgcgtataatatttgcccatagtgaaaacgggggcgaagaagttgtccatattggccacgtttaaatcaaaactggtgaaactcacccagggattggctgagacgaaaaacatattctcaataaaccctttagggaaataggccaggttttcaccgtaacacgccacatcttgcgaatatatgtgtagaaactgccggaaatcgtcgtggtattcactccagagcgatgaaaacgtttcagtttgctcatggaaaacggtgtaacaagggtgaacactatcccatatcaccagctcaccgtctttcattgccatacggaactccggatgagcattcatcaggcgggcaagaatgtgaataaaggccggataaaacttgtgcttatttttctttacggtctttaaaaaggccgtaatatccagctgaacggtctggttataggtacattgagcaactgactgaaatgcctcaaaatgttctttacgatgccattgggatatatcaacggtggtatatccagtgatttttttctccattttagcttccttagctcctgaaaatctcgataactcaaaaaatacgcccggtagtgatcttatttcattatggtgaaagttggaacctcttacgtgccaggccaaataggccgt

SEQ ID NO: 242 - DNA, 7461 bp, Artificial
  Synthetic
agacttagggaccctgcggccgccattaattcctaatttttgttgacactctatcattgatagagttattttaccactccctatcagtgatagagaaaagtgaaatgaatagaccggccgctgagaaaaagcgaagcggcactgctctttaacaatttatcagacaatctgtgtgggcactcgaagatacggattcttaacgtcgcaagacgaaaaatgaataccaagtctcaagagtgaacacgtaattcattacgaagtttaattctttgagcgtcaaacttttggagagtttgatcctggctcagaacgaacgctggcggcgtgcctaacacatgcaagtcgaacggtaacagatctagcttgctagatgctgacgagtggcgcacgggtgagtaacgcgtggatatctgcctattagtgggggacaacttgtggaaacgcaagctaataccgcataagccctacgggggaaagcaggggaccttcgggccttgtgctgatagatgagtccgcgtctgattagctagttggtagggtaaaggcctaccaaggcgatgatcagtagctggtttgagaggatgatcagccacactggaactgagacacggtccagacttctacggaaggcagcagtggggaatattgcacaatgggcgcaagcctgatgcagcgacgccgcgtgtgggaagaaggctttagggttgtaaaccactttcaattgggaagaagagatgagtgttaatagcattctgatttgacggtacctttagaagaagcaccggctaatttcgtgccagcagccgcggtaatacgaaaggtgcaagcgttgttcggatttactgggcgtaaagagagtgtaggttgtttattaagtcggatgtgaaatcccggggctcaacctcggaactgcattcgatactggtagactagagttcgggaggggtaagcggaattccgtgtgtagcagtgaaatgcgtagatatacggaggaacacctgaggcgaaggcggcttactggaccgatactgacactgagactcgaaagcgtgggtagcaaacaggattagataccctggtagtccacgccctaaacgatgtcaactagccgttgcgggtatcgacccctgcagtggcgaagctaacgcgataagttgaccgcctggggagtacggtcgcaagattaaaactcaaaggaattgacgggggcccgcacaagcggtggagcatgtggtttaattcgacgcaacgcgaagaaccttacctgggcttgacatctacagaattctttagagatagagaagtgccttcgggaactgtaagacaggtgctgcatggctgtcgtcagctcgtgtcgtgagatgttcggttaagtccggcaacgagcgcaacccctattgttagttgccatcattaagttgggcactctagcgagactgccggtgacaaaccggaggaaggtggggacgacgtcaagtcatcatggcccttatgtccagggctacacacgtgctacaatggcagatacaacgagtcgcaataccgcgaggtggagctaatctccaaagtctgtctcagttcggatcgtagtctgcaactcgactacgtgaagttggaatcgctagtaatcgcggatcagcatgccgcggtgaatacgttcccgggccttgtacacaccgcccgtcacaccatgggaattggttgcaccagaagccgctgggctaactcttcggagaggcaggcgtctacggtgtggtcggtaactggggtgaagtcgtaacaaggtatccgtaccggaaggtgcggatggatcatgtggtttccttaaagaagcgtactttgtagtgctcacacagattgtctgatagaaagtgaaaagcaaggcgtttacgcgttgggagtgaggctgaagagaataaggccgttcgctttctattaatgaaagctcaccctacacgaaaatatcacgcaacgcgtgataagcaattttcgtgtccccttcgtctagaggcccaggacaccgccctttcacggcggtaacaggggttcgaatcccctaggggacgccacttgctggtttgtgagtgaaagtcgccgaccttaatatctcaaaactcatcttcgggtgatgtttgagatatttgctctttaaaaatctggatcaagctgaaaattgaaacactgaacaacgagagttgttcgtgagtctctcaaattttcgcaacacgatgatgaatcgaaagaaacatcttcgggttgtgaggtcaagtgaacaagggtctatggtggatgccttggcgttaagcggcgatgaaagacgtgactacctgcgataaacttcggggagctggtaagtaagctttgatccggaggtttctgaatggggaaacccggcctaatttattaggtcactctcatctgaatatataggatgagtagagctaacggggggaattgaaacatcttagtacccctaggaaagtaaatcaaacgagattccctgagtagcggcgagcgaaacgggaaaagcccaaaccagataacttgttatctggggttgtaggactgcaatgtggtattgacaatgtatagcagaacaagctgggaagcttggccatagtgggtgatagccccgtatgcgaaatatagagtcagcctagcagtatcctgagtaggtcggagcacgtgaaactttgactgaatctggggggaccaccctccaaggctaaatacgacttaacgaccgatagtgaaccagtaccgtgagggaaaggtgaaaagcaccccgatgaggggagtgaaatagacctgaaaccatggacctacaagcagtaggagcactatgtcctcggacagtgtgactgcgtaccttttgtataatgggccaacgacttatggctcagtggcaagattaagcttttaagcgaagtcgtagcgaaagcgagtcttaatagggcgacatagtcactgggcatagacccgaagccaggcgagctatccatgagcaggttgaagcggtggtaagacatcgtggaggaccgaacccacattggctgaagacaatggggatgacttgtggataggggtgaaaggccaatcaagcctggcaatagctggttctctccgaaagctatttaggtagcgcctcatgtatcaccctcgggggtagagcactgaatgggctaggggccttcaccggttaccaaacctaatcaaactccgaataccgaggagtgcaatcatgggagacagacgatgggtgctaacgtccattgtcaagagggatacaacccagaccaacagctaaggtccccaagtgtatgttaagtgggaaacgatgtggaaaggcagagacagccaggaggttagcttagaagcagctaccctttaaagaaagcgtaatagctcactggtcgagtcggtctgcgcggaagatataacggggctcaaacataccaccgaagctttgggtgcaatttattgcacggtaggagagcgttctgtaagtcgatgaagccatactgtaaggagtggtggagatatcagaagtgagaatgttggcataagtagcgataaaacgggtgaaaaacccgttcaccgaaagcccaaggattcctgcactatgctaatcagagcagggttagtcggcccctaaggcgaggcagaaatgcgtagtcgatgggaaacaggttaatattcctgtaccgatgttaaatgcgacggggagacggagaaaggtagctgatccgggcgtttggttgtcccggttcaagcgtgtaggcatgagtggttggcaaatccgccactctttatgctgaggcgttatgtggggttcttacttcggtttgaacgaactcagtgatcctatgcttccaggaaaatcctctaagcttcagtttaacattgaccgtaccgtaaaccgacacaggtaggcgaggcgagaagcctaaggtgcttgagataactcaggttaaggaactcggcaaattggccccgtaacttcgggagaaggggtgcccattgtaggtgaagagacttgctctcggagcccaagtgggttgcagtgaccagggggtagcgactgtttactaaaaacacagcactctgctaagacgtaagtcgacgtatagggtgtgacgcctgcccggtgccggaaggttaaaaggagtggttagcgcttgacgcgaagctgtgaattgaagccccggtaaacggcggccgtaactataacggtcctaaggtagcgaaattccttgtcgggtaagttccgacctgcacgaatggcgtaacgacttccccactgtctcaacctgagactcagcgaaattgaatttgctgtgaagatgcagcatacccgcggctagacggaaagaccccgtgcacctttactacagcttgacattggatctaggtatattttgtgcaggataggtgggaggctttgatctatagacgccagtttatagtgagccacccttgagataccaccctgaatatgcttgggttctaaccacggtccgttatccggacttgggacattgtctggtgggtagtttgactggggcggtcgcctcctaaagagtaacggaggcgcgcgaagttacactcaggctggtcggaaatcagccattgagcgcaagagtatatgtgtgactgactgcgagacctacaagtcgagcagggaagaaattcggttctagtgatccggcggtagcgagtggaagtgccgtcgctcaacggataaaaggtacgccggggataacaggctgatcgcgcccaagagttcatatcgacggcgcggtttggcacctcgatgtcggctcatcacatcctggggctggagcaggtcccaagggttcggctgttcgccgattaaagtggtacgtgagctgggtttagaacgtcgtgagacagttcggtccctatctaccgtgggcgttggagaattgagggaatctgtccttagtacgagaggaccgggatggacaaacctctggtgtttctgttgttctgccaagagcattgcagggtagctacgtttggaatggataaccgctgaaggcatctaagcgggaagccagtcccaagattaattctcccagaactttaagctctctaaagggtcgtggaagactaccacgttgataggctgggtgtggaagggtagtaatacctggagctgaccagtactaattgcccgtgtggcttgaccatacaacgccgaagctgttttggcggatgagagaagattttcagcctgatacagattaaatcagaacgcagaagcggtctgataaaacagaatttttcctggtgtccatagcgaggaagtaacgcctgatcccatcccgaactcagaagcgaagtgccttagcgccgatggtactgtagcgttcgctacgggagagtaggtccagccagaggcggcaaataaaacgaaaggctcagtcgaaagactgggcctttcgttttatctgttgtttgtcggtgaacgctctcctgagtaggacaaatccgccgggagcggatttgaacgttgcgaagcaacggcccggagggtggcgggcaggacgcccgccataaactgccaggcatcaaattaagcagaaggccatcctgacggatggcctttttgcgtttctacaaactcttcctgtcgtcatatctacaagccggcgcgccgggaaatgtgcgcggaacccctatttgtttatttttctaaatacattcaaatatgtatccgctcatgagacaataaccctgataaatgcttcaataatattgaaaaaggaagagtatgagtattcaacatttccgtgtcgcccttattcccttttttgcggcattttgccttcctgtttttgctcacccagaaacgctggtgaaagtaaaagatgctgaagatcagttgggtgcacgagtgggttacatcgaactggatctcaacagcggtaagatccttgagagttttcgccccgaagaacgttttccaatgatgagcacttttaaagttctgctatgtggcgcggtattatcccgtgttgacgccgggcaagagcaactcggtcgccgcatacactattctcagaatgacttggttgagtactcaccagtcacagaaaagcatcttacggatggcatgacagtaagagaattatgcagtgctgcaataaccatgagtgataacactgcggccaacttacttctgacaacgatcggaggaccgaaggagctaaccgcttttttgcacaacatgggggatcatgtaactcgccttgatcgttgggaaccggagctgaatgaagccataccaaacgacgagcgtgacaccacgatgcctgcagcaatggcaacaacgttgcgcaaactattaactggcgaactacttactctagcttcccggcaacaattaatagactggatggaggcggataaagttgcaggaccacttctgcgctcggcccttccggctagctggtttattgctgataaatctggagccggtgagcgtgggtctcgcggtatcattgcagcactggggccagatggtaagccctcccgtatcgtagttatctacacgacggggagtcaggcaactatggatgaacgaaatagacagatcgctgagataggtgcctcactgattaagcattggtaactgcagaccaagtttactcatatatactttagattgatttaaaacttcatttttaatttaaaaggatctaggtgaagatcctttttgataatctcatgaccaaaatcccttaacgtgagttttcgttccactgagcgtcagaccccgtagaaaagatcaaaggatcttcttgagatcctttttttctgcgcgtaatctgctgcttgcaaacaaaaaaaccaccgctaccagcggtggtttgtttgccggatcaagagctaccaactctttttccgaaggtaactggcttcagcagagcgcagataccaaatactgtccttctagtgtagccgtagttaggccaccacttcaagaactctgtagcaccgcctacatacctcgctctgctaatcctgttaccagtggctgctgccagtggcgataagtcgtgtcttaccgggttggactcaagacgatagttaccggataaggcgcagcggtcgggctgaacggggggttcgtgcacacagcccagcttggagcgaacgacctacaccgaactgagatacctacagcgtgagctatgagaaagcgccacgcttcccgaagggagaaaggcggacaggtatccggtaagcggcagggtcggaacaggagagcgcacgagggagcttccagggggaaacgcctggtatctttatagtcctgtcgggtttcgccacctctgacttgagcgtcgatttttgtgatgctcgtcaggggggcggagcctatggaaaaacgccagcaacgcggcctttttacggttcctggccttttgctgg

SEQ ID NO: 243 - DNA, 4147 bp, Artificial
  Synthetic
tcagatccttccgtatttagccagtatgttctctagtgtggttcgttgtttttgcgtgagccatgagaacgaaccattgagatcatgcttactttgcatgtcactcaaaaattttgcctcaaaactggtgagctgaatttttgcagttaaagcatcgtgtagtgtttttcttagtccgttacgtaggtaggaatctgatgtaatggttgttggtattttgtcaccattcatttttatctggttgttctcaagttcggttacgagatccatttgtctatctagttcaacttggaaaatcaacgtatcagtcgggcggcctcgcttatcaaccaccaatttcatattgctgtaagtgtttaaatctttacttattggtttcaaaacccattggttaagccttttaaactcatggtagttattttcaagcattaacatgaacttaaattcatcaaggctaatctctatatttgccttgtgagttttcttttgtgttagttcttttaataaccactcataaatcctcatagagtatttgttttcaaaagacttaacatgttccagattatattttatgaatttttttaactggaaaagataaggcaatatctcttcactaaaaactaattctaatttttcgcttgagaacttggcatagtttgtccactggaaaatcttaaagcctttaaccaaaggattcctgatttccacagttctcgtcatcagctctctggttgctttagctaatacaccataagcattttccctactgatgttcatcatctgagcgtattggttataagtgaacgataccgtccgttctttccttgtagggttttcaatcgtggggttgagtagtgccacacagcataaaattagcttggtttcatgctccgttaagtcatagcgactaatcgctagttcatttgctttgaaaacaactaattcagacatacatctcaattggtctaggtgattttaatcactataccaattgagatgggctagtcaatgataattactagtccttttcctttgagttgtgggtatctgtaaattctgctagacctttgctggaaaacttgtaaattctgctagaccctctgtaaattccgctagacctttgtgtgttttttttgtttatattcaagtggttataatttatagaataaagaaagaataaaaaaagataaaaagaatagatcccagccctgtgtataactcactactttagtcagttccgcagtattacaaaaggatgtcgcaaacgctgtttgctcctctacaaaacagaccttaaaaccctaaaggcttaagtagcaccctcgcaagctcgggcaaatcgctgaatattccttttgtctccgaccatcaggcacctgagtcgctgtctttttcgtgacattcagttcgctgcgctcacggctctggcagtgaatgggggtaaatggcactacaggcgccttttatggattcatgcaaggaaactacccataatacaagaaaagcccgtcacgggcttctcagggcgttttatggcgggtctgctatgtggtgctatctgactttttgctgttcagcagttcctgccctctgattttccagtctgaccacttcggattatcccgtgacaggtcattcagactggctaatgcacccagtaaggcagcggtatcatcaacaggcttacccgtcttactgtcaagaggacatccggtcaaataaaacgaaaggctcagtcgaaagactgggcctttcgttttgctgaggagacttagggaccctttatgacaacttgacggctacatcattcactttttcttcacaaccggcacggaactcgctcgggctggccccggtgcattttttaaatacccgcgagaaatagagttgatcgtcaaaaccaacattgcgaccgacggtggcgataggcatccgggtggtgctcaaaagcagcttcgcctggctgatacgttggtcctcgcgccagcttaagacgctaatccctaactgctggcggaaaagatgtgacagacgcgacggcgacaagcaaacatgctgtgcgacgctggcgatatcaaaattgctgtctgccaggtgatcgctgatgtactgacaagcctcgcgtacccgattatccatcggtggatggagcgactcgttaatcgcttccatgcgccgcagtaacaattgctcaagcagatttatcgccagcagctccgaatagcgcccttccccttgcccggcgttaatgatttgcccaaacaggtcgctgaaatgcggctggtgcgcttcatccgggcgaaagaaccccgtattggcaaatattgacggccagttaagccattcatgccagtaggcgcgcggacgaaagtaaacccactggtgataccattcgcgagcctccggatgacgaccgtagtgatgaatctctcctggcgggaacagcaaaatatcacccggtcggcaaacaaattctcgtccctgatttttcaccaccccctgaccgcgaatggtgagattgagaatataacctttcattcccagcggtcggtcgataaaaaaatcgagataaccgttggcctcaatcggcgttaaacccgccaccagatgggcattaaacgagtatcccggcagcaggggatcattttgcgcttcagccatacttttcatactcccaccattcagagaagaaaccaattgtccatattgcatcagacattgccgtcactgcgtcttttactggctcttctcgctaacccaaccggtaaccccgcttattaaaagcattctgtaacaaagcgggaccaaagccatgacaaaaacgcgtaacaaaagtgtctataatcacggcagaaaagtccacattgattatttgcacggcgtcacactttgctatgccatagcatttttatccataagattagcggatcctacctgacgctttttatcgcaactctctactgtttctccatacccgttttacctgcaggtgcagtttttttcgaggagctcgacggtggccaacacaccttccgccaaaaaacgcgccaaacaggctgagaagcgtcgcagccacaacgccagcctgcgctccatggtgcgcacctacatcaagaacgtcgtgaaagccatcgacgccaaggacctggaaaaagcccaggccgccttcaccgccgctgtaccggtgatcgaccgcatggctgacaaaggcatcatccacaagaacaaggctgctcgtcataagagccgtctgagcggccacatcaaggccctcagcaccgctgccgcctaacgcactccacttaattaacggcactcctcagccaagtcaaaagcctccggtcggaggcttttgactacatgcccatggcgtttacgccccgccctgccactcatcgcagtactgttgtaattcattaagcattctgccgacatggaagccatcacaaacggcatgatgaacctgaatcgccagcggcatcagcaccttgtcgccttgcgtataatatttgcccatagtgaaaacgggggcgaagaagttgtccatattggccacgtttaaatcaaaactggtgaaactcacccagggattggctgagacgaaaaacatattctcaataaaccctttagggaaataggccaggttttcaccgtaacacgccacatcttgcgaatatatgtgtagaaactgccggaaatcgtcgtggtattcactccagagcgatgaaaacgtttcagtttgctcatggaaaacggtgtaacaagggtgaacactatcccatatcaccagctcaccgtctttcattgccatacggaactccggatgagcattcatcaggcgggcaagaatgtgaataaaggccggataaaacttgtgcttatttttctttacggtctttaaaaaggccgtaatatccagctgaacggtctggttataggtacattgagcaactgactgaaatgcctcaaaatgttctttacgatgccattgggatatatcaacggtggtatatccagtgatttttttctccattttagcttccttagctcctgaaaatctcgataactcaaaaaatacgcccggtagtgatcttatttcattatggtgaaagttggaacctcttacgtgccaggccaaataggccgt

SEQ ID NO: 244 - DNA, 4427 bp, Artificial
  Synthetic
tcagatccttccgtatttagccagtatgttctctagtgtggttcgttgtttttgcgtgagccatgagaacgaaccattgagatcatgcttactttgcatgtcactcaaaaattttgcctcaaaactggtgagctgaatttttgcagttaaagcatcgtgtagtgtttttcttagtccgttacgtaggtaggaatctgatgtaatggttgttggtattttgtcaccattcatttttatctggttgttctcaagttcggttacgagatccatttgtctatctagttcaacttggaaaatcaacgtatcagtcgggcggcctcgcttatcaaccaccaatttcatattgctgtaagtgtttaaatctttacttattggtttcaaaacccattggttaagccttttaaactcatggtagttattttcaagcattaacatgaacttaaattcatcaaggctaatctctatatttgccttgtgagttttcttttgtgttagttcttttaataaccactcataaatcctcatagagtatttgttttcaaaagacttaacatgttccagattatattttatgaatttttttaactggaaaagataaggcaatatctcttcactaaaaactaattctaatttttcgcttgagaacttggcatagtttgtccactggaaaatcttaaagcctttaaccaaaggattcctgatttccacagttctcgtcatcagctctctggttgctttagctaatacaccataagcattttccctactgatgttcatcatctgagcgtattggttataagtgaacgataccgtccgttctttccttgtagggttttcaatcgtggggttgagtagtgccacacagcataaaattagcttggtttcatgctccgttaagtcatagcgactaatcgctagttcatttgctttgaaaacaactaattcagacatacatctcaattggtctaggtgattttaatcactataccaattgagatgggctagtcaatgataattactagtccttttcctttgagttgtgggtatctgtaaattctgctagacctttgctggaaaacttgtaaattctgctagaccctctgtaaattccgctagacctttgtgtgttttttttgtttatattcaagtggttataatttatagaataaagaaagaataaaaaaagataaaaagaatagatcccagccctgtgtataactcactactttagtcagttccgcagtattacaaaaggatgtcgcaaacgctgtttgctcctctacaaaacagaccttaaaaccctaaaggcttaagtagcaccctcgcaagctcgggcaaatcgctgaatattccttttgtctccgaccatcaggcacctgagtcgctgtctttttcgtgacattcagttcgctgcgctcacggctctggcagtgaatgggggtaaatggcactacaggcgccttttatggattcatgcaaggaaactacccataatacaagaaaagcccgtcacgggcttctcagggcgttttatggcgggtctgctatgtggtgctatctgactttttgctgttcagcagttcctgccctctgattttccagtctgaccacttcggattatcccgtgacaggtcattcagactggctaatgcacccagtaaggcagcggtatcatcaacaggcttacccgtcttactgtcaagaggacatccggtcaaataaaacgaaaggctcagtcgaaagactgggcctttcgttttgctgaggagacttagggaccctttatgacaacttgacggctacatcattcactttttcttcacaaccggcacggaactcgctcgggctggccccggtgcattttttaaatacccgcgagaaatagagttgatcgtcaaaaccaacattgcgaccgacggtggcgataggcatccgggtggtgctcaaaagcagcttcgcctggctgatacgttggtcctcgcgccagcttaagacgctaatccctaactgctggcggaaaagatgtgacagacgcgacggcgacaagcaaacatgctgtgcgacgctggcgatatcaaaattgctgtctgccaggtgatcgctgatgtactgacaagcctcgcgtacccgattatccatcggtggatggagcgactcgttaatcgcttccatgcgccgcagtaacaattgctcaagcagatttatcgccagcagctccgaatagcgcccttccccttgcccggcgttaatgatttgcccaaacaggtcgctgaaatgcggctggtgcgcttcatccgggcgaaagaaccccgtattggcaaatattgacggccagttaagccattcatgccagtaggcgcgcggacgaaagtaaacccactggtgataccattcgcgagcctccggatgacgaccgtagtgatgaatctctcctggcgggaacagcaaaatatcacccggtcggcaaacaaattctcgtccctgatttttcaccaccccctgaccgcgaatggtgagattgagaatataacctttcattcccagcggtcggtcgataaaaaaatcgagataaccgttggcctcaatcggcgttaaacccgccaccagatgggcattaaacgagtatcccggcagcaggggatcattttgcgcttcagccatacttttcatactcccaccattcagagaagaaaccaattgtccatattgcatcagacattgccgtcactgcgtcttttactggctcttctcgctaacccaaccggtaaccccgcttattaaaagcattctgtaacaaagcgggaccaaagccatgacaaaaacgcgtaacaaaagtgtctataatcacggcagaaaagtccacattgattatttgcacggcgtcacactttgctatgccatagcatttttatccataagattagcggatcctacctgacgctttttatcgcaactctctactgtttctccatacccgttttacctgcaggtgcagtttttttcgaggagctcgacggtggccaacacaccttccgccaaaaaacgcgccaaacaggctgagaagcgtcgcagccacaacgccagcctgcgctccatggtgcgcacctacatcaagaacgtcgtgaaagccatcgacgccaaggacctggaaaaagcccaggccgccttcaccgccgctgtaccggtgatcgaccgcatggctgacaaaggcatcatccacaagaacaaggctgctcgtcataagagccgtctgagcggccacatcaaggccctcagcaccgctgccgcctaacgcactccactacaggaacgaagttcacatggtaaccatccgtcttgctcgtggcggctccaaaaagcgccccttctaccacctgaccgtgaccaacagccgcaatgcgcgcgatggtcgcttcgtcgagcgcatcggtttcttcaacccggttgcgactggtggcgaagtgcgtctgtccgtcgaccaggagcgtgctacctactggctcggccagggtgcacagccgtctgagcgcgttgctcagctgctcaaggacgctgccaaggcaaacgcctaagccgtcatacttaattaacggcactcctcagccaagtcaaaagcctccggtcggaggcttttgactacatgcccatggcgtttacgccccgccctgccactcatcgcagtactgttgtaattcattaagcattctgccgacatggaagccatcacaaacggcatgatgaacctgaatcgccagcggcatcagcaccttgtcgccttgcgtataatatttgcccatagtgaaaacgggggcgaagaagttgtccatattggccacgtttaaatcaaaactggtgaaactcacccagggattggctgagacgaaaaacatattctcaataaaccctttagggaaataggccaggttttcaccgtaacacgccacatcttgcgaatatatgtgtagaaactgccggaaatcgtcgtggtattcactccagagcgatgaaaacgtttcagtttgctcatggaaaacggtgtaacaagggtgaacactatcccatatcaccagctcaccgtctttcattgccatacggaactccggatgagcattcatcaggcgggcaagaatgtgaataaaggccggataaaacttgtgcttatttttctttacggtctttaaaaaggccgtaatatccagctgaacggtctggttataggtacattgagcaactgactgaaatgcctcaaaatgttctttacgatgccattgggatatatcaacggtggtatatccagtgatttttttctccattttagcttccttagctcctgaaaatctcgataactcaaaaaatacgcccggtagtgatcttatttcattatggtgaaagttggaacctcttacgtgccaggccaaataggccgt

SEQ ID NO: 245 - DNA, 4427 bp, Artificial; identical to SEQ ID NO: 244
  Synthetic

SEQ ID NO: 246 - DNA, 6433 bp, Artificial
  Synthetic
tcagatccttccgtatttagccagtatgttctctagtgtggttcgttgtttttgcgtgagccatgagaacgaaccattgagatcatgcttactttgcatgtcactcaaaaattttgcctcaaaactggtgagctgaatttttgcagttaaagcatcgtgtagtgtttttcttagtccgttacgtaggtaggaatctgatgtaatggttgttggtattttgtcaccattcatttttatctggttgttctcaagttcggttacgagatccatttgtctatctagttcaacttggaaaatcaacgtatcagtcgggcggcctcgcttatcaaccaccaatttcatattgctgtaagtgtttaaatctttacttattggtttcaaaacccattggttaagccttttaaactcatggtagttattttcaagcattaacatgaacttaaattcatcaaggctaatctctatatttgccttgtgagttttcttttgtgttagttcttttaataaccactcataaatcctcatagagtatttgttttcaaaagacttaacatgttccagattatattttatgaatttttttaactggaaaagataaggcaatatctcttcactaaaaactaattctaatttttcgcttgagaacttggcatagtttgtccactggaaaatcttaaagcctttaaccaaaggattcctgatttccacagttctcgtcatcagctctctggttgctttagctaatacaccataagcattttccctactgatgttcatcatctgagcgtattggttataagtgaacgataccgtccgttctttccttgtagggttttcaatcgtggggttgagtagtgccacacagcataaaattagcttggtttcatgctccgttaagtcatagcgactaatcgctagttcatttgctttgaaaacaactaattcagacatacatctcaattggtctaggtgattttaatcactataccaattgagatgggctagtcaatgataattactagtccttttcctttgagttgtgggtatctgtaaattctgctagacctttgctggaaaacttgtaaattctgctagaccctctgtaaattccgctagacctttgtgtgttttttttgtttatattcaagtggttataatttatagaataaagaaagaataaaaaaagataaaaagaatagatcccagccctgtgtataactcactactttagtcagttccgcagtattacaaaaggatgtcgcaaacgctgtttgctcctctacaaaacagaccttaaaaccctaaaggcttaagtagcaccctcgcaagctcgggcaaatcgctgaatattccttttgtctccgaccatcaggcacctgagtcgctgtctttttcgtgacattcagttcgctgcgctcacggctctggcagtgaatgggggtaaatggcactacaggcgccttttatggattcatgcaaggaaactacccataatacaagaaaagcccgtcacgggcttctcagggcgttttatggcgggtctgctatgtggtgctatctgactttttgctgttcagcagttcctgccctctgattttccagtctgaccacttcggattatcccgtgacaggtcattcagactggctaatgcacccagtaaggcagcggtatcatcaacaggcttacccgtcttactgtcaagaggacatccggtcaaataaaacgaaaggctcagtcgaaagactgggcctttcgttttgctgaggagacttagggaccctttatgacaacttgacggctacatcattcactttttcttcacaaccggcacggaactcgctcgggctggccccggtgcattttttaaatacccgcgagaaatagagttgatcgtcaaaaccaacattgcgaccgacggtggcgataggcatccgggtggtgctcaaaagcagcttcgcctggctgatacgttggtcctcgcgccagcttaagacgctaatccctaactgctggcggaaaagatgtgacagacgcgacggcgacaagcaaacatgctgtgcgacgctggcgatatcaaaattgctgtctgccaggtgatcgctgatgtactgacaagcctcgcgtacccgattatccatcggtggatggagcgactcgttaatcgcttccatgcgccgcagtaacaattgctcaagcagatttatcgccagcagctccgaatagcgcccttccccttgcccggcgttaatgatttgcccaaacaggtcgctgaaatgcggctggtgcgcttcatccgggcgaaagaaccccgtattggcaaatattgacggccagttaagccattcatgccagtaggcgcgcggacgaaagtaaacccactggtgataccattcgcgagcctccggatgacgaccgtagtgatgaatctctcctggcgggaacagcaaaatatcacccggtcggcaaacaaattctcgtccctgatttttcaccaccccctgaccgcgaatggtgagattgagaatataacctttcattcccagcggtcggtcgataaaaaaatcgagataaccgttggcctcaatcggcgttaaacccgccaccagatgggcattaaacgagtatcccggcagcaggggatcattttgcgcttcagccatacttttcatactcccaccattcagagaagaaaccaattgtccatattgcatcagacattgccgtcactgcgtcttttactggctcttctcgctaacccaaccggtaaccccgcttattaaaagcattctgtaacaaagcgggaccaaagccatgacaaaaacgcgtaacaaaagtgtctataatcacggcagaaaagtccacattgattatttgcacggcgtcacactttgctatgccatagcatttttatccataagattagcggatcctacctgacgctttttatcgcaactctctactgtttctccatacccgttttacctgcaggtgcagtttttttcgaggagctcgacggtggccaacacaccttccgccaaaaaacgcgccaaacaggctgagaagcgtcgcagccacaacgccagcctgcgctccatggtgcgcacctacatcaagaacgtcgtgaaagccatcgacgccaaggacctggaaaaagcccaggccgccttcaccgccgctgtaccggtgatcgaccgcatggctgacaaaggcatcatccacaagaacaaggctgctcgtcataagagccgtctgagcggccacatcaaggccctcagcaccgctgccgcctaacgcactccactacaggaacgaagttcacatggtaaccatccgtcttgctcgtggcggctccaaaaagcgccccttctaccacctgaccgtgaccaacagccgcaatgcgcgcgatggtcgcttcgtcgagcgcatcggtttcttcaacccggttgcgactggtggcgaagtgcgtctgtccgtcgaccaggagcgtgctacctactggctcggccagggtgcacagccgtctgagcgcgttgctcagctgctcaaggacgctgccaaggcaaacgcctaagccgtcatctttgactacaggtatgaacatgagcgaaagcttcgcagaactctttgaagaaagtctgaaatccctcgacatgcagccgggtgccatcatcaccggcatcgtggtcgacatcgatggtgactgggtcaccgtccatgccggtctgaaatccgagggcgtcatcccggtcgagcagttctacaacgaacagggcgagctgaccatcaaggtgggtgacgaagtccacgtcgcactggacgcggtagaagacggctttggcgagaccaagctgtcccgcgagaaagccaagcgcgccgagagctggattgttctggaagcggctttcgctgccgacgaagtggtcaagggcgtcatcaacggcaaggtcaagggcggtttcaccgtcgacgtcaacggcatccgcgcgttcctgccgggttctctggtcgacgttcgtccggttcgcgacaccacccacctggaaggcaaagagctcgagttcaaggtcatcaagctcgaccagaagcgcaacaacgttgtcgtttcccgccgcagcgtcctggaagccgagaacagcgccgagcgtgaagctctgctggaatcgctgcaggaaggccagcaggtcaaaggtatcgtcaagaacctcaccgactacggcgcattcgtggacctgggcggcgtagacggcctgctacacatcaccgacatggcctggaagcgcatcaagcatccgtccgagatcgtcaacgttggcgacgagatcgacgtcaaggtcctgaagttcgaccgcgagcgcaaccgtgtatccctgggcctgaagcaactgggcgaagacccgtgggttgccatcaaggcgcgttacccggaaggtacccgcgtcatggcccgcgtcaccaacctcaccgactacggctgcttcgccgagctggaagagggcgtggaaggcctggtacacgtctccgaaatggactggaccaacaagaacatccatccgtcgaaagtcgtccaggttggcgatgaagtggaagttcaggttctggacatcgacgaagagcgtcgtcgtatctccctgggtatcaagcagtgcaaatccaacccgtgggaagacttctccagccagttcaacaagggtgaccgtatctccggtaccatcaagtcgatcaccgacttcggtatcttcatcggtctggacggcggcatcgacggcctggtccacctgtccgacatctcctggaacgaagtcggcgaagaagccgtacgtcgcttcaagaagggcgacgagctggaaaccgtcatcctgtcggtcgatccggagcgcgagcgcatctccctgggcatcaagcagctggaagacgatccgttctccaactacgcgtccctgcacgagaaaggcagcatcgtccgcggtaccgtgaaggaagtcgacgccaagggcgctgtcatcagcctgggcgacgacatcgaaggtatcctgaaggcttccgaaatcagccgtgaccgcgtcgaagacgcgcgcaacgtcctgaaggaaggcgaggaagtcgaagccaagatcatcagcatcgaccgcaagagccgcgtcatcagcctctccgtcaagtccaaggacgtcgacgacgagaaggacgcaatgaaagaactgcgtaagcaggaagtagaaagcgctggtccgaccaccatcggtgatctgatccgtgctcagatggagaatcagggctaagtctctgatcactcagaggaagcccatcatggcactgagcgttgaagaaaaagcgcagatcgttaacgaatacaagcaagctgaaggcgacaccggttccccggaagtgcaggtagccctgctgtccgccaacatcaacaagctgcaggatcacttcaaggccaacggcaaggatcaccattcccgccgtggtctgatccgtatggttaaccagcgccgtaagctgctggactacctgaagggcaaagacgtgtctcgctacactgccctgatcggccgtctgggtctgcgtcgctaagcgacgccacttaattaacggcactcctcagccaagtcaaaagcctccggtcggaggcttttgactacatgcccatggcgtttacgccccgccctgccactcatcgcagtactgttgtaattcattaagcattctgccgacatggaagccatcacaaacggcatgatgaacctgaatcgccagcggcatcagcaccttgtcgccttgcgtataatatttgcccatagtgaaaacgggggcgaagaagttgtccatattggccacgtttaaatcaaaactggtgaaactcacccagggattggctgagacgaaaaacatattctcaataaaccctttagggaaataggccaggttttcaccgtaacacgccacatcttgcgaatatatgtgtagaaactgccggaaatcgtcgtggtattcactccagagcgatgaaaacgtttcagtttgctcatggaaaacggtgtaacaagggtgaacactatcccatatcaccagctcaccgtctttcattgccatacggaactccggatgagcattcatcaggcgggcaagaatgtgaataaaggccggataaaacttgtgcttatttttctttacggtctttaaaaaggccgtaatatccagctgaacggtctggttataggtacattgagcaactgactgaaatgcctcaaaatgttctttacgatgccattgggatatatcaacggtggtatatccagtgatttttttctccattttagcttccttagctcctgaaaatctcgataactcaaaaaatacgcccggtagtgatcttatttcattatggtgaaagttggaacctcttacgtgccaggccaaataggccgt

SEQ ID NO: 247 - DNA, 4415 bp, Artificial
  Synthetic
tcagatccttccgtatttagccagtatgttctctagtgtggttcgttgtttttgcgtgagccatgagaacgaaccattgagatcatgcttactttgcatgtcactcaaaaattttgcctcaaaactggtgagctgaatttttgcagttaaagcatcgtgtagtgtttttcttagtccgttacgtaggtaggaatctgatgtaatggttgttggtattttgtcaccattcatttttatctggttgttctcaagttcggttacgagatccatttgtctatctagttcaacttggaaaatcaacgtatcagtcgggcggcctcgcttatcaaccaccaatttcatattgctgtaagtgtttaaatctttacttattggtttcaaaacccattggttaagccttttaaactcatggtagttattttcaagcattaacatgaacttaaattcatcaaggctaatctctatatttgccttgtgagttttcttttgtgttagttcttttaataaccactcataaatcctcatagagtatttgttttcaaaagacttaacatgttccagattatattttatgaatttttttaactggaaaagataaggcaatatctcttcactaaaaactaattctaatttttcgcttgagaacttggcatagtttgtccactggaaaatcttaaagcctttaaccaaaggattcctgatttccacagttctcgtcatcagctctctggttgctttagctaatacaccataagcattttccctactgatgttcatcatctgagcgtattggttataagtgaacgataccgtccgttctttccttgtagggttttcaatcgtggggttgagtagtgccacacagcataaaattagcttggtttcatgctccgttaagtcatagcgactaatcgctagttcatttgctttgaaaacaactaattcagacatacatctcaattggtctaggtgattttaatcactataccaattgagatgggctagtcaatgataattactagtccttttcctttgagttgtgggtatctgtaaattctgctagacctttgctggaaaacttgtaaattctgctagaccctctgtaaattccgctagacctttgtgtgttttttttgtttatattcaagtggttataatttatagaataaagaaagaataaaaaaagataaaaagaatagatcccagccctgtgtataactcactactttagtcagttccgcagtattacaaaaggatgtcgcaaacgctgtttgctcctctacaaaacagaccttaaaaccctaaaggcttaagtagcaccctcgcaagctcgggcaaatcgctgaatattccttttgtctccgaccatcaggcacctgagtcgctgtctttttcgtgacattcagttcgctgcgctcacggctctggcagtgaatgggggtaaatggcactacaggcgccttttatggattcatgcaaggaaactacccataatacaagaaaagcccgtcacgggcttctcagggcgttttatggcgggtctgctatgtggtgctatctgactttttgctgttcagcagttcctgccctctgattttccagtctgaccacttcggattatcccgtgacaggtcattcagactggctaatgcacccagtaaggcagcggtatcatcaacaggcttacccgtcttactgtcaagaggacatccggtcaaataaaacgaaaggctcagtcgaaagactgggcctttcgttttgctgaggagacttagggaccctttatgacaacttgacggctacatcattcactttttcttcacaaccggcacggaactcgctcgggctggccccggtgcattttttaaatacccgcgagaaatagagttgatcgtcaaaaccaacattgcgaccgacggtggcgataggcatccgggtggtgctcaaaagcagcttcgcctggctgatacgttggtcctcgcgccagcttaagacgctaatccctaactgctggcggaaaagatgtgacagacgcgacggcgacaagcaaacatgctgtgcgacgctggcgatatcaaaattgctgtctgccaggtgatcgctgatgtactgacaagcctcgcgtacccgattatccatcggtggatggagcgactcgttaatcgcttccatgcgccgcagtaacaattgctcaagcagatttatcgccagcagctccgaatagcgcccttccccttgcccggcgttaatgatttgcccaaacaggtcgctgaaatgcggctggtgcgcttcatccgggcgaaagaaccccgtattggcaaatattgacggccagttaagccattcatgccagtaggcgcgcggacgaaagtaaacccactggtgataccattcgcgagcctccggatgacgaccgtagtgatgaatctctcctggcgggaacagcaaaatatcacccggtcggcaaacaaattctcgtccctgatttttcaccaccccctgaccgcgaatggtgagattgagaatataacctttcattcccagcggtcggtcgataaaaaaatcgagataaccgttggcctcaatcggcgttaaacccgccaccagatgggcattaaacgagtatcccggcagcaggggatcattttgcgcttcagccatacttttcatactcccaccattcagagaagaaaccaattgtccatattgcatcagacattgccgtcactgcgtcttttactggctcttctcgctaacccaaccggtaaccccgcttattaaaagcattctgtaacaaagcgggaccaaagccatgacaaaaacgcgtaacaaaagtgtctataatcacggcagaaaagtccacattgattatttgcacggcgtcacactttgctatgccatagcatttttatccataagattagcggatcctacctgacgctttttatcgcaactctctactgtttctccatacccgttttacctgcaggtgcagttttattttgggagttacaccttggctaacattaagtctgctaagaagcgtgcaatccaagccgaaaagcgtcgtcagcacaacgctagccgtcgttcaatgactcgtacaagcatcaagaaagttatcgctgcaattgcaagcggtgacaaagaagcggcacaagctgcacttactgctgctactccagtacttgacagaatggctactaaaggcttgattcacaagaacaaagctgctcgtcataagagccgtctagctgcacaaatcaaagcactaggttaatctttacgacaacgagtttgaggcatttatggttactattcgtttacagcgtggtggcgcgaaaaagcgtccattttatcaactagtggtggctgatagccgtcgtgcaagaaacggtcgtttcattgaaaacatcggtttcttcaacccaactgcacaaggtcaagcggagcgtcttcgcgtagatctagagcgtgttgaatactgggttggtgtaggcgcgagcttatcagatcgcgtttctagcttggtaaaagaagcgaaaaaatctgcagcgtaagctgttatacttaattaacggcactcctcagccaagtcaaaagcctccggtcggaggcttttgactacatgcccatggcgtttacgccccgccctgccactcatcgcagtactgttgtaattcattaagcattctgccgacatggaagccatcacaaacggcatgatgaacctgaatcgccagcggcatcagcaccttgtcgccttgcgtataatatttgcccatagtgaaaacgggggcgaagaagttgtccatattggccacgtttaaatcaaaactggtgaaactcacccagggattggctgagacgaaaaacatattctcaataaaccctttagggaaataggccaggttttcaccgtaacacgccacatcttgcgaatatatgtgtagaaactgccggaaatcgtcgtggtattcactccagagcgatgaaaacgtttcagtttgctcatggaaaacggtgtaacaagggtgaacactatcccatatcaccagctcaccgtctttcattgccatacggaactccggatgagcattcatcaggcgggcaagaatgtgaataaaggccggataaaacttgtgcttatttttctttacggtctttaaaaaggccgtaatatccagctgaacggtctggttataggtacattgagcaactgactgaaatgcctcaaaatgttctttacgatgccattgggatatatcaacggtggtatatccagtgatttttttctccattttagcttccttagctcctgaaaatctcgataactcaaaaaatacgcccggtagtgatcttatttcattatggtgaaagttggaacctcttacgtgccaggccaaataggccgt

SEQ ID NO: 248 - DNA, 4132 bp, Artificial
  Synthetic
tcagatccttccgtatttagccagtatgttctctagtgtggttcgttgtttttgcgtgagccatgagaacgaaccattgagatcatgcttactttgcatgtcactcaaaaattttgcctcaaaactggtgagctgaatttttgcagttaaagcatcgtgtagtgtttttcttagtccgttacgtaggtaggaatctgatgtaatggttgttggtattttgtcaccattcatttttatctggttgttctcaagttcggttacgagatccatttgtctatctagttcaacttggaaaatcaacgtatcagtcgggcggcctcgcttatcaaccaccaatttcatattgctgtaagtgtttaaatctttacttattggtttcaaaacccattggttaagccttttaaactcatggtagttattttcaagcattaacatgaacttaaattcatcaaggctaatctctatatttgccttgtgagttttcttttgtgttagttcttttaataaccactcataaatcctcatagagtatttgttttcaaaagacttaacatgttccagattatattttatgaatttttttaactggaaaagataaggcaatatctcttcactaaaaactaattctaatttttcgcttgagaacttggcatagtttgtccactggaaaatcttaaagcctttaaccaaaggattcctgatttccacagttctcgtcatcagctctctggttgctttagctaatacaccataagcattttccctactgatgttcatcatctgagcgtattggttataagtgaacgataccgtccgttctttccttgtagggttttcaatcgtggggttgagtagtgccacacagcataaaattagcttggtttcatgctccgttaagtcatagcgactaatcgctagttcatttgctttgaaaacaactaattcagacatacatctcaattggtctaggtgattttaatcactataccaattgagatgggctagtcaatgataattactagtccttttcctttgagttgtgggtatctgtaaattctgctagacctttgctggaaaacttgtaaattctgctagaccctctgtaaattccgctagacctttgtgtgttttttttgtttatattcaagtggttataatttatagaataaagaaagaataaaaaaagataaaaagaatagatcccagccctgtgtataactcactactttagtcagttccgcagtattacaaaaggatgtcgcaaacgctgtttgctcctctacaaaacagaccttaaaaccctaaaggcttaagtagcaccctcgcaagctcgggcaaatcgctgaatattccttttgtctccgaccatcaggcacctgagtcgctgtctttttcgtgacattcagttcgctgcgctcacggctctggcagtgaatgggggtaaatggcactacaggcgccttttatggattcatgcaaggaaactacccataatacaagaaaagcccgtcacgggcttctcagggcgttttatggcgggtctgctatgtggtgctatctgactttttgctgttcagcagttcctgccctctgattttccagtctgaccacttcggattatcccgtgacaggtcattcagactggctaatgcacccagtaaggcagcggtatcatcaacaggcttacccgtcttactgtcaagaggacatccggtcaaataaaacgaaaggctcagtcgaaagactgggcctttcgttttgctgaggagacttagggaccctttatgacaacttgacggctacatcattcactttttcttcacaaccggcacggaactcgctcgggctggccccggtgcattttttaaatacccgcgagaaatagagttgatcgtcaaaaccaacattgcgaccgacggtggcgataggcatccgggtggtgctcaaaagcagcttcgcctggctgatacgttggtcctcgcgccagcttaagacgctaatccctaactgctggcggaaaagatgtgacagacgcgacggcgacaagcaaacatgctgtgcgacgctggcgatatcaaaattgctgtctgccaggtgatcgctgatgtactgacaagcctcgcgtacccgattatccatcggtggatggagcgactcgttaatcgcttccatgcgccgcagtaacaattgctcaagcagatttatcgccagcagctccgaatagcgcccttccccttgcccggcgttaatgatttgcccaaacaggtcgctgaaatgcggctggtgcgcttcatccgggcgaaagaaccccgtattggcaaatattgacggccagttaagccattcatgccagtaggcgcgcggacgaaagtaaacccactggtgataccattcgcgagcctccggatgacgaccgtagtgatgaatctctcctggcgggaacagcaaaatatcacccggtcggcaaacaaattctcgtccctgatttttcaccaccccctgaccgcgaatggtgagattgagaatataacctttcattcccagcggtcggtcgataaaaaaatcgagataaccgttggcctcaatcggcgttaaacccgccaccagatgggcattaaacgagtatcccggcagcaggggatcattttgcgcttcagccatacttttcatactcccaccattcagagaagaaaccaattgtccatattgcatcagacattgccgtcactgcgtcttttactggctcttctcgctaacccaaccggtaaccccgcttattaaaagcattctgtaacaaagcgggaccaaagccatgacaaaaacgcgtaacaaaagtgtctataatcacggcagaaaagtccacattgattatttgcacggcgtcacactttgctatgccatagcatttttatccataagattagcggatcctacctgacgctttttatcgcaactctctactgtttctccatacccgttttacctgcaggtgcagtagtttttgggagttagacccttggcaaataacaaatctgctaagaagcgcgctatccaagctgagaaacgtcgccagcacaatgctagccgtcgttctatgatgcgcacttacatgaagaaaactgttgctgcaatcgctgctggcgacaaagaagctgcaactgctgcattcgctgtagttacaccaatcctagaccgcatggcgactaaaggccttattcacaagaataaagcagctcgtcacaagtctcgcttctttgctgctatcaacgctctgtaatagagtttacttaattaacggcactcctcagccaagtcaaaagcctccggtcggaggcttttgactacatgcccatggcgtttacgccccgccctgccactcatcgcagtactgttgtaattcattaagcattctgccgacatggaagccatcacaaacggcatgatgaacctgaatcgccagcggcatcagcaccttgtcgccttgcgtataatatttgcccatagtgaaaacgggggcgaagaagttgtccatattggccacgtttaaatcaaaactggtgaaactcacccagggattggctgagacgaaaaacatattctcaataaaccctttagggaaataggccaggttttcaccgtaacacgccacatcttgcgaatatatgtgtagaaactgccggaaatcgtcgtggtattcactccagagcgatgaaaacgtttcagtttgctcatggaaaacggtgtaacaagggtgaacactatcccatatcaccagctcaccgtctttcattgccatacggaactccggatgagcattcatcaggcgggcaagaatgtgaataaaggccggataaaacttgtgcttatttttctttacggtctttaaaaaggccgtaatatccagctgaacggtctggttataggtacattgagcaactgactgaaatgcctcaaaatgttctttacgatgccattgggatatatcaacggtggtatatccagtgatttttttctccattttagcttccttagctcctgaaaatctcgataactcaaaaaatacgcccggtagtgatcttatttcattatggtgaaagttggaacctcttacgtgccaggccaaataggccgt

SEQ ID NO: 249 - DNA, 4120 bp, Artificial
  Synthetic
tcagatccttccgtatttagccagtatgttctctagtgtggttcgttgtttttgcgtgagccatgagaacgaaccattgagatcatgcttactttgcatgtcactcaaaaattttgcctcaaaactggtgagctgaatttttgcagttaaagcatcgtgtagtgtttttcttagtccgttacgtaggtaggaatctgatgtaatggttgttggtattttgtcaccattcatttttatctggttgttctcaagttcggttacgagatccatttgtctatctagttcaacttggaaaatcaacgtatcagtcgggcggcctcgcttatcaaccaccaatttcatattgctgtaagtgtttaaatctttacttattggtttcaaaacccattggttaagccttttaaactcatggtagttattttcaagcattaacatgaacttaaattcatcaaggctaatctctatatttgccttgtgagttttcttttgtgttagttcttttaataaccactcataaatcctcatagagtatttgttttcaaaagacttaacatgttccagattatattttatgaatttttttaactggaaaagataaggcaatatctcttcactaaaaactaattctaatttttcgcttgagaacttggcatagtttgtccactggaaaatcttaaagcctttaaccaaaggattcctgatttccacagttctcgtcatcagctctctggttgctttagctaatacaccataagcattttccctactgatgttcatcatctgagcgtattggttataagtgaacgataccgtccgttctttccttgtagggttttcaatcgtggggttgagtagtgccacacagcataaaattagcttggtttcatgctccgttaagtcatagcgactaatcgctagttcatttgctttgaaaacaactaattcagacatacatctcaattggtctaggtgattttaatcactataccaattgagatgggctagtcaatgataattactagtccttttcctttgagttgtgggtatctgtaaattctgctagacctttgctggaaaacttgtaaattctgctagaccctctgtaaattccgctagacctttgtgtgttttttttgtttatattcaagtggttataatttatagaataaagaaagaataaaaaaagataaaaagaatagatcccagccctgtgtataactcactactttagtcagttccgcagtattacaaaaggatgtcgcaaacgctgtttgctcctctacaaaacagaccttaaaaccctaaaggcttaagtagcaccctcgcaagctcgggcaaatcgctgaatattccttttgtctccgaccatcaggcacctgagtcgctgtctttttcgtgacattcagttcgctgcgctcacggctctggcagtgaatgggggtaaatggcactacaggcgccttttatggattcatgcaaggaaactacccataatacaagaaaagcccgtcacgggcttctcagggcgttttatggcgggtctgctatgtggtgctatctgactttttgctgttcagcagttcctgccctctgattttccagtctgaccacttcggattatcccgtgacaggtcattcagactggctaatgcacccagtaaggcagcggtatcatcaacaggcttacccgtcttactgtcaagaggacatccggtcaaataaaacgaaaggctcagtcgaaagactgggcctttcgttttgctgaggagacttagggaccctttatgacaacttgacggctacatcattcactttttcttcacaaccggcacggaactcgctcgggctggccccggtgcattttttaaatacccgcgagaaatagagttgatcgtcaaaaccaacattgcgaccgacggtggcgataggcatccgggtggtgctcaaaagcagcttcgcctggctgatacgttggtcctcgcgccagcttaagacgctaatccctaactgctggcggaaaagatgtgacagacgcgacggcgacaagcaaacatgctgtgcgacgctggcgatatcaaaattgctgtctgccaggtgatcgctgatgtactgacaagcctcgcgtacccgattatccatcggtggatggagcgactcgttaatcgcttccatgcgccgcagtaacaattgctcaagcagatttatcgccagcagctccgaatagcgcccttccccttgcccggcgttaatgatttgcccaaacaggtcgctgaaatgcggctggtgcgcttcatccgggcgaaagaaccccgtattggcaaatattgacggccagttaagccattcatgccagtaggcgcgcggacgaaagtaaacccactggtgataccattcgcgagcctccggatgacgaccgtagtgatgaatctctcctggcgggaacagcaaaatatcacccggtcggcaaacaaattctcgtccctgatttttcaccaccccctgaccgcgaatggtgagattgagaatataacctttcattcccagcggtcggtcgataaaaaaatcgagataaccgttggcctcaatcggcgttaaacccgccaccagatgggcattaaacgagtatcccggcagcaggggatcattttgcgcttcagccatacttttcatactcccaccattcagagaagaaaccaattgtccatattgcatcagacattgccgtcactgcgtcttttactggctcttctcgctaacccaaccggtaaccccgcttattaaaagcattctgtaacaaagcgggaccaaagccatgacaaaaacgcgtaacaaaagtgtctataatcacggcagaaaagtccacattgattatttgcacggcgtcacactttgctatgccatagcatttttatccataagattagcggatcctacctgacgctttttatcgcaactctctactgtttctccatacccgttttacctgcaggtgcagttgaaatgcaaagaggacgacatggtaaccattcgtttggcacgtcacggcgcgaaaaagcgtccattctatcaaatcgttgtagctgacagccgcaactcagcaactggccgtttcatcgagaaagtaggtttctttaaccctactgctactggtcaagaagaaggcctgcgtctagacctagatcgcgtgaaccactgggtttcacaaggcgcatctctgtctgatcgcgtagcacagctagttaaaaccgctcaaaaagcggcttaattattactacttaattaacggcactcctcagccaagtcaaaagcctccggtcggaggcttttgactacatgcccatggcgtttacgccccgccctgccactcatcgcagtactgttgtaattcattaagcattctgccgacatggaagccatcacaaacggcatgatgaacctgaatcgccagcggcatcagcaccttgtcgccttgcgtataatatttgcccatagtgaaaacgggggcgaagaagttgtccatattggccacgtttaaatcaaaactggtgaaactcacccagggattggctgagacgaaaaacatattctcaataaaccctttagggaaataggccaggttttcaccgtaacacgccacatcttgcgaatatatgtgtagaaactgccggaaatcgtcgtggtattcactccagagcgatgaaaacgtttcagtttgctcatggaaaacggtgtaacaagggtgaacactatcccatatcaccagctcaccgtctttcattgccatacggaactccggatgagcattcatcaggcgggcaagaatgtgaataaaggccggataaaacttgtgcttatttttctttacggtctttaaaaaggccgtaatatccagctgaacggtctggttataggtacattgagcaactgactgaaatgcctcaaaatgttctttacgatgccattgggatatatcaacggtggtatatccagtgatttttttctccattttagcttccttagctcctgaaaatctcgataactcaaaaaatacgcccggtagtgatcttatttcattatggtgaaagttggaacctcttacgtgccaggccaaataggccgt

SEQ ID NO: 250 - DNA, 4409 bp, Artificial
  Synthetic
tcagatccttccgtatttagccagtatgttctctagtgtggttcgttgtttttgcgtgagccatgagaacgaaccattgagatcatgcttactttgcatgtcactcaaaaattttgcctcaaaactggtgagctgaatttttgcagttaaagcatcgtgtagtgtttttcttagtccgttacgtaggtaggaatctgatgtaatggttgttggtattttgtcaccattcatttttatctggttgttctcaagttcggttacgagatccatttgtctatctagttcaacttggaaaatcaacgtatcagtcgggcggcctcgcttatcaaccaccaatttcatattgctgtaagtgtttaaatctttacttattggtttcaaaacccattggttaagccttttaaactcatggtagttattttcaagcattaacatgaacttaaattcatcaaggctaatctctatatttgccttgtgagttttcttttgtgttagttcttttaataaccactcataaatcctcatagagtatttgttttcaaaagacttaacatgttccagattatattttatgaatttttttaactggaaaagataaggcaatatctcttcactaaaaactaattctaatttttcgcttgagaacttggcatagtttgtccactggaaaatcttaaagcctttaaccaaaggattcctgatttccacagttctcgtcatcagctctctggttgctttagctaatacaccataagcattttccctactgatgttcatcatctgagcgtattggttataagtgaacgataccgtccgttctttccttgtagggttttcaatcgtggggttgagtagtgccacacagcataaaattagcttggtttcatgctccgttaagtcatagcgactaatcgctagttcatttgctttgaaaacaactaattcagacatacatctcaattggtctaggtgattttaatcactataccaattgagatgggctagtcaatgataattactagtccttttcctttgagttgtgggtatctgtaaattctgctagacctttgctggaaaacttgtaaattctgctagaccctctgtaaattccgctagacctttgtgtgttttttttgtttatattcaagtggttataatttatagaataaagaaagaataaaaaaagataaaaagaatagatcccagccctgtgtataactcactactttagtcagttccgcagtattacaaaaggatgtcgcaaacgctgtttgctcctctacaaaacagaccttaaaaccctaaaggcttaagtagcaccctcgcaagctcgggcaaatcgctgaatattccttttgtctccgaccatcaggcacctgagtcgctgtctttttcgtgacattcagttcgctgcgctcacggctctggcagtgaatgggggtaaatggcactacaggcgccttttatggattcatgcaaggaaactacccataatacaagaaaagcccgtcacgggcttctcagggcgttttatggcgggtctgctatgtggtgctatctgactttttgctgttcagcagttcctgccctctgattttccagtctgaccacttcggattatcccgtgacaggtcattcagactggctaatgcacccagtaaggcagcggtatcatcaacaggcttacccgtcttactgtcaagaggacatccggtcaaataaaacgaaaggctcagtcgaaagactgggcctttcgttttgctgaggagacttagggaccctttatgacaacttgacggctacatcattcactttttcttcacaaccggcacggaactcgctcgggctggccccggtgcattttttaaatacccgcgagaaatagagttgatcgtcaaaaccaacattgcgaccgacggtggcgataggcatccgggtggtgctcaaaagcagcttcgcctggctgatacgttggtcctcgcgccagcttaagacgctaatccctaactgctggcggaaaagatgtgacagacgcgacggcgacaagcaaacatgctgtgcgacgctggcgatatcaaaattgctgtctgccaggtgatcgctgatgtactgacaagcctcgcgtacccgattatccatcggtggatggagcgactcgttaatcgcttccatgcgccgcagtaacaattgctcaagcagatttatcgccagcagctccgaatagcgcccttccccttgcccggcgttaatgatttgcccaaacaggtcgctgaaatgcggctggtgcgcttcatccgggcgaaagaaccccgtattggcaaatattgacggccagttaagccattcatgccagtaggcgcgcggacgaaagtaaacccactggtgataccattcgcgagcctccggatgacgaccgtagtgatgaatctctcctggcgggaacagcaaaatatcacccggtcggcaaacaaattctcgtccctgatttttcaccaccccctgaccgcgaatggtgagattgagaatataacctttcattcccagcggtcggtcgataaaaaaatcgagataaccgttggcctcaatcggcgttaaacccgccaccagatgggcattaaacgagtatcccggcagcaggggatcattttgcgcttcagccatacttttcatactcccaccattcagagaagaaaccaattgtccatattgcatcagacattgccgtcactgcgtcttttactggctcttctcgctaacccaaccggtaaccccgcttattaaaagcattctgtaacaaagcgggaccaaagccatgacaaaaacgcgtaacaaaagtgtctataatcacggcagaaaagtccacattgattatttgcacggcgtcacactttgctatgccatagcatttttatccataagattagcggatcctacctgacgctttttatcgcaactctctactgtttctccatacccgttttacctgcaggtgcagtagtttttgggagttagacccttggcaaataacaaatctgctaagaagcgcgctatccaagctgagaaacgtcgccagcacaatgctagccgtcgttctatgatgcgcacttacatgaagaaaactgttgctgcaatcgctgctggcgacaaagaagctgcaactgctgcattcgctgtagttacaccaatcctagaccgcatggcgactaaaggccttattcacaagaataaagcagctcgtcacaagtctcgcttctttgctgctatcaacgctctgtaatagagttttgaaatgcaaagaggacgacatggtaaccattcgtttggcacgtcacggcgcgaaaaagcgtccattctatcaaatcgttgtagctgacagccgcaactcagcaactggccgtttcatcgagaaagtaggtttctttaaccctactgctactggtcaagaagaaggcctgcgtctagacctagatcgcgtgaaccactgggtttcacaaggcgcatctctgtctgatcgcgtagcacagctagttaaaaccgctcaaaaagcggcttaattattactacttaattaacggcactcctcagccaagtcaaaagcctccggtcggaggcttttgactacatgcccatggcgtttacgccccgccctgccactcatcgcagtactgttgtaattcattaagcattctgccgacatggaagccatcacaaacggcatgatgaacctgaatcgccagcggcatcagcaccttgtcgccttgcgtataatatttgcccatagtgaaaacgggggcgaagaagttgtccatattggccacgtttaaatcaaaactggtgaaactcacccagggattggctgagacgaaaaacatattctcaataaaccctttagggaaataggccaggttttcaccgtaacacgccacatcttgcgaatatatgtgtagaaactgccggaaatcgtcgtggtattcactccagagcgatgaaaacgtttcagtttgctcatggaaaacggtgtaacaagggtgaacactatcccatatcaccagctcaccgtctttcattgccatacggaactccggatgagcattcatcaggcgggcaagaatgtgaataaaggccggataaaacttgtgcttatttttctttacggtctttaaaaaggccgtaatatccagctgaacggtctggttataggtacattgagcaactgactgaaatgcctcaaaatgttctttacgatgccattgggatatatcaacggtggtatatccagtgatttttttctccattttagcttccttagctcctgaaaatctcgataactcaaaaaatacgcccggtagtgatcttatttcattatggtgaaagttggaacctcttacgtgccaggccaaataggccgt

SEQ ID NO: 251 - DNA, 7956 bp, Artificial
  Synthetic
tcagatccttccgtatttagccagtatgttctctagtgtggttcgttgtttttgcgtgagccatgagaacgaaccattgagatcatgcttactttgcatgtcactcaaaaattttgcctcaaaactggtgagctgaatttttgcagttaaagcatcgtgtagtgtttttcttagtccgttacgtaggtaggaatctgatgtaatggttgttggtattttgtcaccattcatttttatctggttgttctcaagttcggttacgagatccatttgtctatctagttcaacttggaaaatcaacgtatcagtcgggcggcctcgcttatcaaccaccaatttcatattgctgtaagtgtttaaatctttacttattggtttcaaaacccattggttaagccttttaaactcatggtagttattttcaagcattaacatgaacttaaattcatcaaggctaatctctatatttgccttgtgagttttcttttgtgttagttcttttaataaccactcataaatcctcatagagtatttgttttcaaaagacttaacatgttccagattatattttatgaatttttttaactggaaaagataaggcaatatctcttcactaaaaactaattctaatttttcgcttgagaacttggcatagtttgtccactggaaaatcttaaagcctttaaccaaaggattcctgatttccacagttctcgtcatcagctctctggttgctttagctaatacaccataagcattttccctactgatgttcatcatctgagcgtattggttataagtgaacgataccgtccgttctttccttgtagggttttcaatcgtggggttgagtagtgccacacagcataaaattagcttggtttcatgctccgttaagtcatagcgactaatcgctagttcatttgctttgaaaacaactaattcagacatacatctcaattggtctaggtgattttaatcactataccaattgagatgggctagtcaatgataattactagtccttttcctttgagttgtgggtatctgtaaattctgctagacctttgctggaaaacttgtaaattctgctagaccctctgtaaattccgctagacctttgtgtgttttttttgtttatattcaagtggttataatttatagaataaagaaagaataaaaaaagataaaaagaatagatcccagccctgtgtataactcactactttagtcagttccgcagtattacaaaaggatgtcgcaaacgctgtttgctcctctacaaaacagaccttaaaaccctaaaggcttaagtagcaccctcgcaagctcgggcaaatcgctgaatattccttttgtctccgaccatcaggcacctgagtcgctgtctttttcgtgacattcagttcgctgcgctcacggctctggcagtgaatgggggtaaatggcactacaggcgccttttatggattcatgcaaggaaactacccataatacaagaaaagcccgtcacgggcttctcagggcgttttatggcgggtctgctatgtggtgctatctgactttttgctgttcagcagttcctgccctctgattttccagtctgaccacttcggattatcccgtgacaggtcattcagactggctaatgcacccagtaaggcagcggtatcatcaacaggcttacccgtcttactgtcaagaggacatccggtcaaataaaacgaaaggctcagtcgaaagactgggcctttcgttttgctgaggagacttagggaccctttatgacaacttgacggctacatcattcactttttcttcacaaccggcacggaactcgctcgggctggccccggtgcattttttaaatacccgcgagaaatagagttgatcgtcaaaaccaacattgcgaccgacggtggcgataggcatccgggtggtgctcaaaagcagcttcgcctggctgatacgttggtcctcgcgccagcttaagacgctaatccctaactgctggcggaaaagatgtgacagacgcgacggcgacaagcaaacatgctgtgcgacgctggcgatatcaaaattgctgtctgccaggtgatcgctgatgtactgacaagcctcgcgtacccgattatccatcggtggatggagcgactcgttaatcgcttccatgcgccgcagtaacaattgctcaagcagatttatcgccagcagctccgaatagcgcccttccccttgcccggcgttaatgatttgcccaaacaggtcgctgaaatgcggctggtgcgcttcatccgggcgaaagaaccccgtattggcaaatattgacggccagttaagccattcatgccagtaggcgcgcggacgaaagtaaacccactggtgataccattcgcgagcctccggatgacgaccgtagtgatgaatctctcctggcgggaacagcaaaatatcacccggtcggcaaacaaattctcgtccctgatttttcaccaccccctgaccgcgaatggtgagattgagaatataacctttcattcccagcggtcggtcgataaaaaaatcgagataaccgttggcctcaatcggcgttaaacccgccaccagatgggcattaaacgagtatcccggcagcaggggatcattttgcgcttcagccatacttttcatactcccaccattcagagaagaaaccaattgtccatattgcatcagacattgccgtcactgcgtcttttactggctcttctcgctaacccaaccggtaaccccgcttattaaaagcattctgtaacaaagcgggaccaaagccatgacaaaaacgcgtaacaaaagtgtctataatcacggcagaaaagtccacattgattatttgcacggcgtcacactttgctatgccatagcatttttatccataagattagcggatcctacctgacgctttttatcgcaactctctactgtttctccatacccgttttacctgcaggtgcagttaagttgggaaagacaaaccatgatccagaccgaatctcggctcgaagtagccgacaacacgggtgcacgtgaagtcctgtgcatcaaggtgctcggcggctcgaagcgtcgttatgccggcattggcgacatcatcaaggtgagcgtcaaagaggcaacgccgcgcgggcgcgtgaagaaaggcgaaatctacaacgccgtggtggttcgcaccgccaagggcgtgcgccgtcaagacggctcgctgatcaagttcgacggcaacgccgctgtgcttttgaataacaagctcgagccgatcggcacccgtatcttcgggccggtgacgcgtgagctgcgtagcgaacgattcatgaagatcgtttcgctggcgccggaagtgctgtaaggagtcgcgatgaacaagattcgcaaaggtgacgaagtcatcgtcgtcactggcaaggacaagggcaagcgcggcgtcgtgctggctgtcggtgctgaacatgtgacggttgaaggtatcaacctcgtcaagaagcatgtgaagccgaacccgatgaagggtacgacgggcggcgtggaagcgaagacgatgcccctgcatatttcgaacgtcgcactggtcgacgcgaatggcaaggcgtcgcgtgttggcatcaaggtcgaggaaggcaagaaggttcgcttcctgaagacgaccggtgccgtactgagcgcctgacgcagcggagtaaaaaatggctcgttttcaagagttttacaaagaaaaggttgtgcccggcctgatcgagaagttcggttacaagtcggtcatggaagtgccgcgcatcaccaagatcacgctgaacatgggtcttggcgaagcgatcgctgacaagaagatcatcgagaacgccgttggcgacctcacgaagatcgccggccagaagccggtcgtcacgaaggctcgcaaggcaatcgcaggcttcaagatccgccagggttatcccatcggcgcgatggtgacgctgcgtggtcaggcgatgtacgaattcctcgaccgtttcgtgacggttgccctgccccgcgtgcgtgacttccgcggcgtgtcgggtcgtgctttcgatggccgtggcaactacaacatcggtgtgaaagagcagatcattttccccgaaatcgattacgacaagatcgacgcactgcgtgggctgaacatcagcatcacgacgactgcgaagaccgacgacgaagcaaaggctctgctcgccagcttcaagttcccgttcagaaactgaggttaccgtggctaaactggcactgatcgaacgtgaaaagaagcgcgcccgcctggtcgcgaagttcgcagcaaagcgcgaagcgctgaaggcgatcgtcgaagaccaaagcaagtcggaagaagagcgctacgaagcacgcctggagctgcagcaactgccccgcaacgcaaacccgacccgccagcgtaaccgctgcgcgatcacgggccgtccgcgtggcacgttccgtaaattcggcctcgcgcgtaacaagattcgtgaaatcgcattccgtggcgagattcctggcctgaccaaggcgagctggtaataggagaaacgtaaatgagcatgagtgatcctatcgccgatatgctgactcgcatccgcaacgcgcagatggtcgagaaggtatcggtcgcgatgccctcgtcgaaggtcaaggttgcaatcgcgcaagtcctgaaggacgaaggctatatcgacgatttcgccgtgaaggcggaaggtgcgaagtccgaactgaatatcgcgctgaagtactacgcaggtcgcccggtcatcgaacgcctcgagcgcgtgtcgaagcctggtctgcgcgtgtaccgcggccgtaacgacattccgcaggtcatgaacggcctcggtgtggcaatcgtgtcgacgccgaagggcgtgatgaccgaccgcaaggcgcgcgctaccggcgtcggcggcgaagtcatctgctacgtcgcttaaagccgaggagagagaaacatgtctcgagtaggtaagagcccgatcgcgctgcaaggcgcggaagtcaagctggccgacggtgcaatcaccgtcaagggcccgctgggcaccatcacgcaagcgatcaatccgctcgtgaacgtggcgaacaacgacggcacgctgaatctgtcgccggtcgacgaaagccgcgaagcaaatgcactgtcgggcacgatgcgcgcgatcatcgcgaatgccgtgcacggcgtgaccaagggtttcgagcgcaagctgacgctggttggcgtcggttaccgtgcgcaagcgcaaggcgacaagctgaacctgtcgctgggtttctcgcacccggtggtgcaccagatgccggaaggcgtcaaggctgaaaccccgacgcaaaccgaaatcgtgatcaaggggatcaacaagcaacaagtcggtcaagtggctgcggaagtccgcggttaccgtccgccggagccctacaagggcaagggcgtgcgttatgccgacgaggttgtgatcctcaaagaaacgaagaagaagtaagggtgcgcaatcatggataagactcaatctcgcctgcgccgcgctcgccagacgcgtatcaagatcgctgagctgcaggtcgcgcgtctcgccgtgcatcgcacgaatacgcacatctacgctcaagtgttctcgccctgcggcaccaaggtgctcgccagcgcgtcgacgctcgaggcagaagtgcgcgcagaactggccgacaagtcgggcaagggcggcaacgtcaatgccgcgacgctgatcggcaagcgtattgccgaaaaggcaaaggctgccggcatcgaatccgtcgccttcgaccgctcgggcttccgctaccacggccgcgtcaaggcgctggctgaggcagctcgcgaagctgggctcaagttctaaggaaggaattcgtcatggcaaagatgcaagcgaaagttcaggctgacgagcgcgacgacggccttcgcgaaaagatgatttcggtcaatcgcgtgaccaaggtcgtgaagggtggccgtattctcggcttcgccgcactgaccgtggttggcgatggtgatggccgcatcggtatgggcaagggcaaggcgaaggaagtgccggtcgctgtccagaaggcaatggaacaagctcgccgcaacatgttcaaggtgccgctcaagaacggcacgctgcagcacgaagtgcacggcaagcatggcgcatccgctgtcctcctcgctccggcgaaggcaggtacgggcgtgatcgccggcggcccgatgcgcgcagtgttcgacgtgatgggcgttcagaacgtcgtggcgaagagccacggttcgacgaacccgtacaacctcgttcgcgccacgctggacggtctgcgcaagcagtcgaccccggcagacatcgcggcgaagcgcggcaagtccgtcgaagatattttgggctaagcccgggtggtcaccatgtctgaaaaaactgtcaaggttcagctcgtcaagagcctgatcgggacccgcgaatcgcaccgcgcgaccgtgcgtggcctgggcctgcgccgactcaattcggttagcgagctgcaggacacgccggcggtccgcggcatgatcaacaaggtctcgtacctcgttaaggtcatcgcgtaagcggccctacggatcaaggagttgatatggaattgaataacctgaagccggccgctggtgcaaagcacgccaagcgtcgcgtcggtcgtggcatcggttcgggcctcggcaagacggctggccgtggtcacaagggtcagaaatcgcgttcgggcggcttccacaaagtcggtttcgaaggcggtcagatgccgctgcaacgtcgtctgccgaagcgcggcttcacgtcgctgacgaaggaattcgtcggtgaagtgcgcctgagcgacctcgagaagctgccggtcgacgagatcgatctgctcgcactgaagcaagccggcctggtcggcgagctgacgaagagcgcaaagatcatcgcgacgggcgaactgaagcgcaagatcgtcgtgaagggtctcggtgccaccaagggtgcgcgcgctgcgatcgaagcggctggcggttcgttcgccgagtgacacgcgtaacttaattaacggcactcctcagccaagtcaaaagcctccggtcggaggcttttgactacatgcccatggcgtttacgccccgccctgccactcatcgcagtactgttgtaattcattaagcattctgccgacatggaagccatcacaaacggcatgatgaacctgaatcgccagcggcatcagcaccttgtcgccttgcgtataatatttgcccatagtgaaaacgggggcgaagaagttgtccatattggccacgtttaaatcaaaactggtgaaactcacccagggattggctgagacgaaaaacatattctcaataaaccctttagggaaataggccaggttttcaccgtaacacgccacatcttgcgaatatatgtgtagaaactgccggaaatcgtcgtggtattcactccagagcgatgaaaacgtttcagtttgctcatggaaaacggtgtaacaagggtgaacactatcccatatcaccagctcaccgtctttcattgccatacggaactccggatgagcattcatcaggcgggcaagaatgtgaataaaggccggataaaacttgtgcttatttttctttacggtctttaaaaaggccgtaatatccagctgaacggtctggttataggtacattgagcaactgactgaaatgcctcaaaatgttctttacgatgccattgggatatatcaacggtggtatatccagtgatttttttctccattttagcttccttagctcctgaaaatctcgataactcaaaaaatacgcccggtagtgatcttatttcattatggtgaaagttggaacctcttacgtgccaagccaaataggccgt

SEQ ID NO: 252 - DNA, 7247 bp, Artificial
  Synthetic
tcagatccttccgtatttagccagtatgttctctagtgtggttcgttgtttttgcgtgagccatgagaacgaaccattgagatcatgcttactttgcatgtcactcaaaaattttgcctcaaaactggtgagctgaatttttgcagttaaagcatcgtgtagtgtttttcttagtccgttacgtaggtaggaatctgatgtaatggttgttggtattttgtcaccattcatttttatctggttgttctcaagttcggttacgagatccatttgtctatctagttcaacttggaaaatcaacgtatcagtcgggcggcctcgcttatcaaccaccaatttcatattgctgtaagtgtttaaatctttacttattggtttcaaaacccattggttaagccttttaaactcatggtagttattttcaagcattaacatgaacttaaattcatcaaggctaatctctatatttgccttgtgagttttcttttgtgttagttcttttaataaccactcataaatcctcatagagtatttgttttcaaaagacttaacatgttccagattatattttatgaatttttttaactggaaaagataaggcaatatctcttcactaaaaactaattctaatttttcgcttgagaacttggcatagtttgtccactggaaaatcttaaagcctttaaccaaaggattcctgatttccacagttctcgtcatcagctctctggttgctttagctaatacaccataagcattttccctactgatgttcatcatctgagcgtattggttataagtgaacgataccgtccgttctttccttgtagggttttcaatcgtggggttgagtagtgccacacagcataaaattagcttggtttcatgctccgttaagtcatagcgactaatcgctagttcatttgctttgaaaacaactaattcagacatacatctcaattggtctaggtgattttaatcactataccaattgagatgggctagtcaatgataattactagtccttttcctttgagttgtgggtatctgtaaattctgctagacctttgctggaaaacttgtaaattctgctagaccctctgtaaattccgctagacctttgtgtgttttttttgtttatattcaagtggttataatttatagaataaagaaagaataaaaaaagataaaaagaatagatcccagccctgtgtataactcactactttagtcagttccgcagtattacaaaaggatgtcgcaaacgctgtttgctcctctacaaaacagaccttaaaaccctaaaggcttaagtagcaccctcgcaagctcgggcaaatcgctgaatattccttttgtctccgaccatcaggcacctgagtcgctgtctttttcgtgacattcagttcgctgcgctcacggctctggcagtgaatgggggtaaatggcactacaggcgccttttatggattcatgcaaggaaactacccataatacaagaaaagcccgtcacgggcttctcagggcgttttatggcgggtctgctatgtggtgctatctgactttttgctgttcagcagttcctgccctctgattttccagtctgaccacttcggattatcccgtgacaggtcattcagactggctaatgcacccagtaaggcagcggtatcatcaacaggcttacccgtcttactgtcaagaggacatccggtcaaataaaacgaaaggctcagtcgaaagactgggcctttcgttttgctgaggagacttagggaccctttatgacaacttgacggctacatcattcactttttcttcacaaccggcacggaactcgctcgggctggccccggtgcattttttaaatacccgcgagaaatagagttgatcgtcaaaaccaacattgcgaccgacggtggcgataggcatccgggtggtgctcaaaagcagcttcgcctggctgatacgttggtcctcgcgccagcttaagacgctaatccctaactgctggcggaaaagatgtgacagacgcgacggcgacaagcaaacatgctgtgcgacgctggcgatatcaaaattgctgtctgccaggtgatcgctgatgtactgacaagcctcgcgtacccgattatccatcggtggatggagcgactcgttaatcgcttccatgcgccgcagtaacaattgctcaagcagatttatcgccagcagctccgaatagcgcccttccccttgcccggcgttaatgatttgcccaaacaggtcgctgaaatgcggctggtgcgcttcatccgggcgaaagaaccccgtattggcaaatattgacggccagttaagccattcatgccagtaggcgcgcggacgaaagtaaacccactggtgataccattcgcgagcctccggatgacgaccgtagtgatgaatctctcctggcgggaacagcaaaatatcacccggtcggcaaacaaattctcgtccctgatttttcaccaccccctgaccgcgaatggtgagattgagaatataacctttcattcccagcggtcggtcgataaaaaaatcgagataaccgttggcctcaatcggcgttaaacccgccaccagatgggcattaaacgagtatcccggcagcaggggatcattttgcgcttcagccatacttttcatactcccaccattcagagaagaaaccaattgtccatattgcatcagacattgccgtcactgcgtcttttactggctcttctcgctaacccaaccggtaaccccgcttattaaaagcattctgtaacaaagcgggaccaaagccatgacaaaaacgcgtaacaaaagtgtctataatcacggcagaaaagtccacattgattatttgcacggcgtcacactttgctatgccatagcatttttatccataagattagcggatcctacctgacgctttttatcgcaactctctactgtttctccatacccgttttacctgcaggtgcagttttgaaaaaagggtattatcatgaaagtgatggcatcggttaagcgcatttgccgcaattgcaagatcatcaagcgcaaaggcgtcgttcgcgtgatctgcagctcggatccgcgccacaagcagcgccaaggctgaccgcgcgtttgtttgcgctttttgtttgaggaaaaacaatggctcgtatcgcaggggttaacatcccgaatcaccagcacaccgagatcggcctgacggctatctttggtgtcggccgcacccgttcgcgcagcatctgcgtggcagctggcgtcgatttttcgaagaaggtcaaggatctgaccgacgcagacctggaaaagctgcgtgaagaagtgggcaagtttgtcgtcgaaggcgatctgcgccgtgaagtgacgatgaacatcaagcgcctgatggacctcggttgctaccgcggcgtccgtcatcgcaagggcctgccgatgcgcggtcagcgtacgcgtacgaacgcacgtacccgcaagggtccgcgtcgtgcagcgcaagcgctgaagaagtaagcggaactgacagttacaggaaaacgtaatggctaaggcttcgaacaccgcggcgcaacgcgttcgcaagaaggttaagaagaacgtcgctgaaggcgtggttcacgttcacgcgtcgttcaacaacacgatcatcacgatcaccgatcgccaaggcaacgctctggcatgggcgacgtcgggcggtcagggcttcaagggctcgcgcaaatcgacgccgttcgctgctcaggtcgcagccgagtcggctggccgcgtcgcgatggaatacggcgtgaagaatctggaagtgcggatcaagggcccgggcccgggccgtgagtcggcagtgcgtgcactgcacggcctcggcatcaagatcaccgcgatttcggacgtcaccccgattccgcacaacggctgccgcccgccgaagcgtcgtcgtatctaaggatgtgctggcacgttcgtgctagcgcattgcctgtcgccgctcagcgtcgacgggcgttgcttttttgattgactaagcccaccgttcgccccaaagggagcggactagcgcggatttcgatccgcgtgactgattgataaaggaatgcaaagtggcacgttatatcggccccaaagccaagctgtcccgccgtgaaggcaccgacctgttcctgaagagcgcacgccgttcgctcgccgacaagtgcaagctcgacagcaagccgggtcagcacggccgtacctcgggcgcacgtacgtccgactacggtacgcagctgcgcgaaaagcagaaggtcaagcgtatctacggcgtgctggaacgtcagttccgtcgctacttcgctgaagccgatcgtcgcaagggcaacacgggtgaaaacctgctgcaactgctcgagtcgcgcctcgacaacgtcgtgtatcgcatgggcttcggctcgacccgcgctgaagcgcgtcagctggtgagccacaagtcgatcaccgtgaacggcgtcgtcgcaaacgtcccgtcgcagcaagtgaaggcgggtgacgtcgtcgcgatccgcgaaaaggcgaagaagcaggcgcgtatcgtcgaagcgctgtcgctggccgagcaaggcggcatgccgagctgggttgcagtcgatgcgaagaagttcgaaggcacgttcaagcaaatgccggaacgcgctgaaatcgcaggcgacatcaacgaaagcctgatcgtcgaattgtattcgcgttaatccgattgacggccgaggtaccccgattgcgttgcgcaaggaggggcctcggctgtttattttctggttgttaccggtcagccttatcggtgtaacgagccgagggtattgaaaaggaaagcccatgcaaaccagtttgctgaaacccaagatcatcgccgtggaatcgctgggcgagaaccacgcgagggtggtcatggaaccgttcgaacgcggttacggccacaccttgggcaatgcgcttcgccgcgtgctgctgtcgtcgatggtgggctacgcgccgaccgaagtcacgatcgcaggcgtggtgcacgagtactcgacgctggatggcgtgcaggaagacgtcgtcaacctgctgctgaacctgaagggcgtggtgttcaagctgcataaccgtgacgaagtgacggttacgctgcgcaaggaaggtgaaggcgtcgtgacggccggcgatatcgagctggctcacgattgcgaagtcatcaacccgaatcacgtgattgcgcatctgtcgaagggcggcaagctcgacgttcagatcaagatcgaaaagggtcgcggctatgtgcccggcaacgtccgtcgctatggcgaagacacggccaagatcatcggccgcatcgtcctcgacgcatcgttctcgccggttcgccgcgtgagctatgcggttgaaagcgcacgtgtcgagcagcgtaccgacctcgacaagctcgtgatgaacatcgagacgagcggcgtgatcacgccggaagaagcgatccgccagtcggcccgcatcctggtcgaccagctgtccgtgttcgcggcgctggaaggcacggaaacggcagccgaagcgccgtcgcgtgcaccgcagatcgatccgatcctgttgcgtccggtggacgatctcgagctgacggttcgttcggcgaactgcctgaaggccgagaacatctactacatcggcgatctgatccagcgcacggaaaacgagctgctgaagacgccgaacctcggtcgcaagtcgctcaacgagatcaaggaagtgctcgcttcgcgcggtctcacgctgggcatgaagctcgagaactggccgccggctggtctcgacaagtaagcccggttgtagcctggctatagctgtagttggcaaagatgcggattttcctttaaaatccgcatcttgctttttttcgttaccggcccgtgcaccctccgaggtgcgatagaagagctggaccaaaactttgaatcaaggaaactgaaatgcgccatcgtcatggtctgcggaaactgaaccgcacgagcagccaccgtctggctatgctccgtaacatgtccaactcgctgatcgagcacgaagtcatcaagacgacgttgccgaaggcgaaggaactccgtaaggtcgtcgagccgctgatcacgctcggcaagaagccgtcgctggcaaaccgtcgcctggcgttcaaccgcctgcgcgatcgtgactcggtggcgaagctgttcgacgtgctcggtccgcgtttcgcgaaccgtccgggcggctacctgcgcgtgctgaagttcggcttccgcgtgggcgacaacgcaccgatggcactggtcgaactgctcgatcgtccggaagtcgacgaaacggaaaacgtgcaagaagctgagtaagcttccgtacttaattaacggcactcctcagccaagtcaaaagcctccggtcggaggcttttgactacatgcccatggcgtttacgccccgccctgccactcatcgcagtactgttgtaattcattaagcattctgccgacatggaagccatcacaaacggcatgatgaacctgaatcgccagcggcatcagcaccttgtcgccttgcgtataatatttgcccatagtgaaaacgggggcgaagaagttgtccatattggccacgtttaaatcaaaactggtgaaactcacccagggattggctgagacgaaaaacatattctcaataaaccctttagggaaataggccaggttttcaccgtaacacgccacatcttgcgaatatatgtgtagaaactgccggaaatcgtcgtggtattcactccagagcgatgaaaacgtttcagtttgctcatggaaaacggtgtaacaagggtgaacactatcccatatcaccagctcaccgtctttcattgccatacggaactccggatgagcattcatcaggcgggcaagaatgtgaataaaggccggataaaacttgtgcttatttttctttacggtctttaaaaaggccgtaatatccagctgaacggtctggttataggtacattgagcaactgactgaaatgcctcaaaatgttctttacgatgccattgggatatatcaacggtggtatatccagtgatttttttctccattttagcttccttagctcctgaaaatctcgataactcaaaaaatacgcccggtagtgatcttatttcattatggtgaaagttggaacctcttacgtgccaagccaaataggccgt

SEQ ID NO: 253 - DNA, 8365 bp, Artificial
  Synthetic
tcagatccttccgtatttagccagtatgttctctagtgtggttcgttgtttttgcgtgagccatgagaacgaaccattgagatcatgcttactttgcatgtcactcaaaaattttgcctcaaaactggtgagctgaatttttgcagttaaagcatcgtgtagtgtttttcttagtccgttacgtaggtaggaatctgatgtaatggttgttggtattttgtcaccattcatttttatctggttgttctcaagttcggttacgagatccatttgtctatctagttcaacttggaaaatcaacgtatcagtcgggcggcctcgcttatcaaccaccaatttcatattgctgtaagtgtttaaatctttacttattggtttcaaaacccattggttaagccttttaaactcatggtagttattttcaagcattaacatgaacttaaattcatcaaggctaatctctatatttgccttgtgagttttcttttgtgttagttcttttaataaccactcataaatcctcatagagtatttgttttcaaaagacttaacatgttccagattatattttatgaatttttttaactggaaaagataaggcaatatctcttcactaaaaactaattctaatttttcgcttgagaacttggcatagtttgtccactggaaaatcttaaagcctttaaccaaaggattcctgatttccacagttctcgtcatcagctctctggttgctttagctaatacaccataagcattttccctactgatgttcatcatctgagcgtattggttataagtgaacgataccgtccgttctttccttgtagggttttcaatcgtggggttgagtagtgccacacagcataaaattagcttggtttcatgctccgttaagtcatagcgactaatcgctagttcatttgctttgaaaacaactaattcagacatacatctcaattggtctaggtgattttaatcactataccaattgagatgggctagtcaatgataattactagtccttttcctttgagttgtgggtatctgtaaattctgctagacctttgctggaaaacttgtaaattctgctagaccctctgtaaattccgctagacctttgtgtgttttttttgtttatattcaagtggttataatttatagaataaagaaagaataaaaaaagataaaaagaatagatcccagccctgtgtataactcactactttagtcagttccgcagtattacaaaaggatgtcgcaaacgctgtttgctcctctacaaaacagaccttaaaaccctaaaggcttaagtagcaccctcgcaagctcgggcaaatcgctgaatattccttttgtctccgaccatcaggcacctgagtcgctgtctttttcgtgacattcagttcgctgcgctcacggctctggcagtgaatgggggtaaatggcactacaggcgccttttatggattcatgcaaggaaactacccataatacaagaaaagcccgtcacgggcttctcagggcgttttatggcgggtctgctatgtggtgctatctgactttttgctgttcagcagttcctgccctctgattttccagtctgaccacttcggattatcccgtgacaggtcattcagactggctaatgcacccagtaaggcagcggtatcatcaacaggcttacccgtcttactgtcaagaggacatccggtcaaataaaacgaaaggctcagtcgaaagactgggcctttcgttttgctgaggagacttagggaccctttatgacaacttgacggctacatcattcactttttcttcacaaccggcacggaactcgctcgggctggccccggtgcattttttaaatacccgcgagaaatagagttgatcgtcaaaaccaacattgcgaccgacggtggcgataggcatccgggtggtgctcaaaagcagcttcgcctggctgatacgttggtcctcgcgccagcttaagacgctaatccctaactgctggcggaaaagatgtgacagacgcgacggcgacaagcaaacatgctgtgcgacgctggcgatatcaaaattgctgtctgccaggtgatcgctgatgtactgacaagcctcgcgtacccgattatccatcggtggatggagcgactcgttaatcgcttccatgcgccgcagtaacaattgctcaagcagatttatcgccagcagctccgaatagcgcccttccccttgcccggcgttaatgatttgcccaaacaggtcgctgaaatgcggctggtgcgcttcatccgggcgaaagaaccccgtattggcaaatattgacggccagttaagccattcatgccagtaggcgcgcggacgaaagtaaacccactggtgataccattcgcgagcctccggatgacgaccgtagtgatgaatctctcctggcgggaacagcaaaatatcacccggtcggcaaacaaattctcgtccctgatttttcaccaccccctgaccgcgaatggtgagattgagaatataacctttcattcccagcggtcggtcgataaaaaaatcgagataaccgttggcctcaatcggcgttaaacccgccaccagatgggcattaaacgagtatcccggcagcaggggatcattttgcgcttcagccatacttttcatactcccaccattcagagaagaaaccaattgtccatattgcatcagacattgccgtcactgcgtcttttactggctcttctcgctaacccaaccggtaaccccgcttattaaaagcattctgtaacaaagcgggaccaaagccatgacaaaaacgcgtaacaaaagtgtctataatcacggcagaaaagtccacattgattatttgcacggcgtcacactttgctatgccatagcatttttatccataagattagcggatcctacctgacgctttttatcgcaactctctactgtttctccatacccgttttacctgcaggtgcagtttcaatttcaggaataaacaatgccaaccatcaaccaactggttcgcaaaggccgtcagtcggaaacgacgaagagcaagagcccggccctgcaggactgcccccagcgtcgcggcgtgtgcacccgtgtgtacacgacgacgccgaagaagcctaactcggcactccgtaaggttgccaaggttcgtctgacgaacggcttcgaagtgatttcgtacatcggcggtgaaggccacaacctgcaggaacactcggttgtgctgatccgcggcggccgtgtgaaggacttgccgggtgtgcgttaccacatggttcgcggctcgctggatacccagggcgtcaaggaccgtaagcaagcgcgttcgaagtacggcgcgaagcgtgcaaaggctgccaagtaagcagtttttgatcagggatcgccgcagggcggtcaaggcgggagtgccggattgccggtgctgtcgagtaagtggtcacccggccaagctggttagtcgtgaagatgtgatcgggtttgttggtggccgcggagctgaatccagctccaactgaacaagtaaaggaagaatcatgccgcgtcgtcgcgaagtccccaagcgggaagtgttgccggatccgaagttcggtaacgttgatgttgccaagttcatgaacatgctgatgctgtccggcaagaagtcggtcgcagagcgcatcgtttatggcgcattcgaacaaatccagaccaagggtggcaaggacccgctggaagtgttcacggttgcgctcaacaacgtgaagccggtggtcgaagtgaagagccgtcgcgttggtggtgccaactatcaagttccggtcgaagtgcgcccgtcgcgtcgtatggcattggcgatgcgctggctgcgtgaggctgcgaagaagcgcagcgagaagtcgatggccctgcgtctggcaggtgaactctccgaagcggccgaaggccgtggcggcgcgatgaagaagcgcgacgaagttcaccgcatggcagaagccaaccgcgcgttctcgcatttccgtttctaagcgcctggctgggctgtttgcggaaataaattccgggcgggtgcgcttttcaggcgcctcgcccgtttgtgttgaggcgtgatgcagcagggctgcatcacgtcatcccagtagaggatcaaagtggctcgcaagactcctatcgagcgctaccgcaatatcggtattagcgctcacatcgacgccggcaaaacgacgacgaccgagcgcattctgttttacaccggtgtgaaccacaagatcggtgaagtccacgacggcgcagccacgatggactggatggagcaggaacaagagcgtggcatcacgatcacgtccgctgctaccacggccttctggaagggcatgggcggcaactatccggaacaccgcatcaacatcatcgacaccccgggccacgtcgacttcacgatcgaagtggaacgctcgatgcgcgtgctcgacggcgcgtgcatggtgtactgcgcagtgggcggcgtgcagccgcagtcggaaacggtgtggcgccaggcgaacaagtacaaggtgccgcgtctcgcgttcgtcaacaagatggaccgtaccggcgcgaacttcttcaaggtctacgaccagctccgtctgcgcctgaaggcgaacccggttccggtcgtggtgccgatcggcgcggaagaaaacttcaagggcgtcgtcgacctgatcaagatgaaggcgatcatttgggacgaagcgtcgcaaggcacgaagttcgactacgtcgacatcccggccgagctcgcggagacctgcaaggaatggcgcgaaaagatggtcgaagtggctgctgaagccagcgaagacctgatgaacaagtacctggaagaaggcgatctgccggaagccgacatcgtcaaggcgctgcgtgatcgtacgatcgcgtgcgaaatccagccgatgctgtgcggtaccgcgttcaagaacaagggcgtgcagcgcatgctcgacgccgtgatcgatttcctgccgtcgccggtcgacatcccgccggtcaagggcgaactcgaaaacggcgaagaagcggagcgcaaggcgtcggacgaagagaagttctcgtcgctcgcgttcaagatcatgaccgacccgttcgtcggccagctgatcttcttccgtgtgtactcgggcgtcgtcaactcgggcgacacgctgctgaactcgaccaagggcaagaaggaacgcctcggccgtattctgcagatgcacgcgaaccagcgtgaagaaatcaaggaagtccgtgcgggcgacatcgccgcagcggtcggcctgaaggaagcaaccacgggcgacacgctgtgcgacccggcgaacccgatcgttcttgaacgcatggtgttcccggagccggtgatttcgcaggcagtcgagccgaagaccaaggctgaccaggaaaagatgggcctcgcactgaaccgtctggctcaggaagacccgtcgttccgcgtgcagaccgacgaagagtcgggccagaccatcatttcgggcatgggcgagctccacctcgaaattctggtcgaccggatgaagcgtgagttcggcgtggaagcgaccgtcggcaagccgcaggttgcgtaccgcgaaacgatccgttcgacggcgaaggatgtcgacggcaagttcgtcaagcagtcgggtggtcgcggccagtacggtcacgcggtcatcacgctcgagccgaacgaacaaggcaagggctacgagttcttcgacgagatcaagggtggtgtgattccgcgtgaatacatcccggcggtcgacaagggtatccaggacacgctgaagtcgggcgtgctggctggcttcccggtcgtcgacgtgaaggttcacctgacgttcggttcgtaccacgacgttgactcgaacgaaaacgcgttccgcatggccggttcgatggcgttcaaggaagcgatgcgcaaggcgaacccggtcgtcctcgagccgatgatggctgtcgaagtcgagacgccggaagactacatgggcaacgtgatgggcgacctgtcgggccgtcgcggcatcgtccagggcatggaagacatggttggcggcggcaagatcgtgcgcgccgaagtgccgctgtcggaaatgttcggttactcgacgtcgctgcgttcgctgacgcaaggtcgtgcaacgtacacgatggagttcaagcactacgctgaagctccgcgcaacgttgctgaagcgatcatcagcgcgaagtcgaagtaaatctgtagctacccaccgataatttttgaaagaagagaatcatggcaaaaggtaaatttgagcggaccaagccgcacgtgaacgttggtacgattggtcacgttgaccacggcaagacgacgctgacggcagcgatcacgacggtgctgacgaagaagttcggcggcgaagcgaaggcatacgaccagatcgacgcggcaccggaagaaaaggcgcgcggcatcacgatcaacacggcacacgtcgagtacgaaacggctaaccgccactacgcacacgtcgactgcccgggccacgctgactatgtgaagaacatgattacgggcgcagcgcagatggacggcgcgatcctggtttgctcggcagcagacggcccgatgccgcaaacgcgcgagcacatcctgctggcgcgtcaggttggcgttccgtacatcatcgtgttcctgaacaagtgcgatatggtggacgacgcggaactgctcgagctggtcgagatggaagttcgcgaactcctgtcgaagtacgacttcccgggcgacgacacgccgatcgtgaagggttcggcgaagctggcgctggaaggcgacacgggcgagctgggcgaagtggcgatcatgagcctggccgacgcgctggacacgtacatcccgacgccggagcgtgcagttgacggcgcgttcctgatgccggtggaagacgtgttctcgatctcgggccgcggtacggtggtgacgggtcgtgtcgagcgcggtatcgtgaaggtcggcgaggaaatcgaaatcgtcggtatcaagccgacggtgaagacgacctgcacgggcgtcgaaatgttccgcaagctgctggaccaaggtcaggcaggcgacaacgtgggtatcctgctgcgcggcacgaagcgtgaagacgtggagcgtggccaagttctggcgaagccgggttcgatcacgccgcacacgcacttcacggctgaagtgtacgtgctgagcaaggacgaaggcggccgtcacacgccgttcttcaacaactaccgtccgcagttctacttccgtacgacggacgtgacgggctcgatcgagctgccgaaggacaaggaaatggtgatgccgggcgacaacgtgtcgatcacggtgaagctgatcgctccgatcgcgatggaagaaggtctgcgcttcgcaatccgcgaaggcggccgtacggtcggcgccggcgtcgtcgccaagatcatcgagtaatatcgacgatccgcggatccacttaattaacggcactcctcagccaagtcaaaagcctccggtcggaggcttttgactacatgcccatggcgtttacgccccgccctgccactcatcgcagtactgttgtaattcattaagcattctgccgacatggaagccatcacaaacggcatgatgaacctgaatcgccagcggcatcagcaccttgtcgccttgcgtataatatttgcccatagtgaaaacgggggcgaagaagttgtccatattggccacgtttaaatcaaaactggtgaaactcacccagggattggctgagacgaaaaacatattctcaataaaccctttagggaaataggccaggttttcaccgtaacacgccacatcttgcgaatatatgtgtagaaactgccggaaatcgtcgtggtattcactccagagcgatgaaaacgtttcagtttgctcatggaaaacggtgtaacaagggtgaacactatcccatatcaccagctcaccgtctttcattgccatacggaactccggatgagcattcatcaggcgggcaagaatgtgaataaaggccggataaaacttgtgcttatttttctttacggtctttaaaaaggccgtaatatccagctgaacggtctggttataggtacattgagcaactgactgaaatgcctcaaaatgttctttacgatgccattgggatatatcaacggtggtatatccagtgatttttttctccattttagcttccttagctcctgaaaatctcgataactcaaaaaatacgcccggtagtgatcttatttcattatggtgaaagttggaacctcttacgtgccaagccaaataggccgt

SEQ ID NO: 254 - DNA, 6246 bp, Artificial
  Synthetic
tcagatccttccgtatttagccagtatgttctctagtgtggttcgttgtttttgcgtgagccatgagaacgaaccattgagatcatgcttactttgcatgtcactcaaaaattttgcctcaaaactggtgagctgaatttttgcagttaaagcatcgtgtagtgtttttcttagtccgttacgtaggtaggaatctgatgtaatggttgttggtattttgtcaccattcatttttatctggttgttctcaagttcggttacgagatccatttgtctatctagttcaacttggaaaatcaacgtatcagtcgggcggcctcgcttatcaaccaccaatttcatattgctgtaagtgtttaaatctttacttattggtttcaaaacccattggttaagccttttaaactcatggtagttattttcaagcattaacatgaacttaaattcatcaaggctaatctctatatttgccttgtgagttttcttttgtgttagttcttttaataaccactcataaatcctcatagagtatttgttttcaaaagacttaacatgttccagattatattttatgaatttttttaactggaaaagataaggcaatatctcttcactaaaaactaattctaatttttcgcttgagaacttggcatagtttgtccactggaaaatcttaaagcctttaaccaaaggattcctgatttccacagttctcgtcatcagctctctggttgctttagctaatacaccataagcattttccctactgatgttcatcatctgagcgtattggttataagtgaacgataccgtccgttctttccttgtagggttttcaatcgtggggttgagtagtgccacacagcataaaattagcttggtttcatgctccgttaagtcatagcgactaatcgctagttcatttgctttgaaaacaactaattcagacatacatctcaattggtctaggtgattttaatcactataccaattgagatgggctagtcaatgataattactagtccttttcctttgagttgtgggtatctgtaaattctgctagacctttgctggaaaacttgtaaattctgctagaccctctgtaaattccgctagacctttgtgtgttttttttgtttatattcaagtggttataatttatagaataaagaaagaataaaaaaagataaaaagaatagatcccagccctgtgtataactcactactttagtcagttccgcagtattacaaaaggatgtcgcaaacgctgtttgctcctctacaaaacagaccttaaaaccctaaaggcttaagtagcaccctcgcaagctcgggcaaatcgctgaatattccttttgtctccgaccatcaggcacctgagtcgctgtctttttcgtgacattcagttcgctgcgctcacggctctggcagtgaatgggggtaaatggcactacaggcgccttttatggattcatgcaaggaaactacccataatacaagaaaagcccgtcacgggcttctcagggcgttttatggcgggtctgctatgtggtgctatctgactttttgctgttcagcagttcctgccctctgattttccagtctgaccacttcggattatcccgtgacaggtcattcagactggctaatgcacccagtaaggcagcggtatcatcaacaggcttacccgtcttactgtcaagaggacatccggtcaaataaaacgaaaggctcagtcgaaagactgggcctttcgttttgctgaggagacttagggaccctttatgacaacttgacggctacatcattcactttttcttcacaaccggcacggaactcgctcgggctggccccggtgcattttttaaatacccgcgagaaatagagttgatcgtcaaaaccaacattgcgaccgacggtggcgataggcatccgggtggtgctcaaaagcagcttcgcctggctgatacgttggtcctcgcgccagcttaagacgctaatccctaactgctggcggaaaagatgtgacagacgcgacggcgacaagcaaacatgctgtgcgacgctggcgatatcaaaattgctgtctgccaggtgatcgctgatgtactgacaagcctcgcgtacccgattatccatcggtggatggagcgactcgttaatcgcttccatgcgccgcagtaacaattgctcaagcagatttatcgccagcagctccgaatagcgcccttccccttgcccggcgttaatgatttgcccaaacaggtcgctgaaatgcggctggtgcgcttcatccgggcgaaagaaccccgtattggcaaatattgacggccagttaagccattcatgccagtaggcgcgcggacgaaagtaaacccactggtgataccattcgcgagcctccggatgacgaccgtagtgatgaatctctcctggcgggaacagcaaaatatcacccggtcggcaaacaaattctcgtccctgatttttcaccaccccctgaccgcgaatggtgagattgagaatataacctttcattcccagcggtcggtcgataaaaaaatcgagataaccgttggcctcaatcggcgttaaacccgccaccagatgggcattaaacgagtatcccggcagcaggggatcattttgcgcttcagccatacttttcatactcccaccattcagagaagaaaccaattgtccatattgcatcagacattgccgtcactgcgtcttttactggctcttctcgctaacccaaccggtaaccccgcttattaaaagcattctgtaacaaagcgggaccaaagccatgacaaaaacgcgtaacaaaagtgtctataatcacggcagaaaagtccacattgattatttgcacggcgtcacactttgctatgccatagcatttttatccataagattagcggatcctacctgacgctttttatcgcaactctctactgtttctccatacccgttttacctgcaggtgcagtgcgttccaatgaggtttcaaatggcaaagaagattatcggctttatcaagctgcagatccctgcaggtaaagccaacccgtcgccgccggtcggtccggcactgggccagcgcggcctgaacatcatggagttctgcaaggcgttcaacgcgcagactcaaggcatggagccgggtctgccggtgccggtggtcatcacggcattcgctgacaagagcttcacgttcgtgatgaagacgccgccggcgaccgtcctgatcaagaaggcggcgaaggtggacaagggctcgagcaagccgcacaccgacaaggtcggttcgatcacgcgcgctcaagccgaagaaatcgcgaagaccaagatgccggatcttacggcagctgatctggacgcagccgttcgcaccatcgctggtagcgcacgctcgatgggtatcactgtggagggcgtgtaaatggctaagatctccaagcgccgtcaggcatttgccgccaaggtcgatcgtcagaagctgtacgcgatcgaagacgcactgagcctcgtgaaggaatgcgcgagcgcgaagttcgacgagtcgatcgacgtcgcagttcagctcggcatcgacgcgaagaagtcggaccaggtcgttcgtggttcggtcgttctcccggcaggtacgggcaagtcggttcgcgttgccgtgttcgcgcaaggcgaaaaggccgagcaggcgcgtgcagcaggcgcggaaatcgtcggcatggaagacctggctgagcagatcaaggctggccagatggacttcgacatcgtgatcgcttcgccggatacgatgcgtatcgtcggtacgctcggtcagatcctgggcccgcgcggcctgatgccgaacccgaaggtcggtacggttacgccggacgtcgcaaccgccgtcaagaacgcgaaggctggtcaggtgcaattccgtgtcgacaaggccggtatcatccacgcgaccatcggccgtgcatcgttcgagccgaccgcgctgcgttcgaacctgtcggcgctgatcgaagcgctgcagaaggcaaagccggcaacgagcaagggcgtgtacctgcgcaagatcgcactgtcgagcacgatgggcgtcggcgtgcgtgtcgaccacgctacgctggcagcacagtaagcaagtattcgggccgcttcgttcacgaagcggcctacatgggctttgggcggttgttcgtgcagtagggcggacaaccggttatcaaagaccgttggtggggcgcagcgggtaggcgatcccttaattcaagccaacgcagatggcgaacccgaaaaagttttgcagtggtgaagccgcaggccgcgaagcgattcgcggcgtgaggtggaaatactcctaacgaggtcggacgccgttgttgaacgaggtacgtgaggtttcggccataccggccatgccgaacgtatcgtttctggaggctaaccgtgccgcttaatagagaagacaagcaagccgtcgtcgctgaggtttccgcgcaagtcgcgaaggcccagaccgttgtgctggctgagtatcgtggaattgcggttggcgatctgaccaagctgcgcgcgaaagcgcgtgagcaacaggtttacctgcgcgtgttgaagaacacgctggcgcgtcgcgccgtcgaaggtacgccttttgctccgctggcagagcagatgactggtcccctgatctacggcatctcggaagatgccattgccgctgctaaggtcgtcaacgacttcagcaagagcaatgaaaagttggtcatcaaggctggttcgttcgatggcaaggtgatggacaaggctggcgtgcaagcgctggcaagcatcccgagccgcgaagaactgctctcgaagctgctgttcgttatgcaatcgcctgtttcgggcttcgcgcgtgctctcgccgcgctggccgagaagaagcaagcggaagctgcgtaagcgaacgtgcatcagcgttactgatcgctggctgtatccgaattcaatttaggagtatttcaaatggcaatcgcaaaagaagacatcctggcagcagtcgaagggatgaccgttctggaactgaacgaactggtcaaggcgttcgaagagaagtttggcgtgtcggcagctgcagtggcagtcgctggcccggcaggcggcggcgcagctgctgcagcagaagagaagaccgaattcacggtcgtcctggctgaagccggcgccaacaaggtttcggtcatcaaggccgttcgtgaactgacgggcctgggcctgaaggaagcgaaggacctggttgacggtgcaccgaagcccgtcaaggaaggcgtcgacaaggctgctgctgaagaagccaagaagaagctggaagaagctggcgcgaaggtcgaagtcaagtaagtttcggcacttaattaacggcactcctcagccaagtcaaaagcctccggtcggaggcttttgactacatgcccatggcgtttacgccccgccctgccactcatcgcagtactgttgtaattcattaagcattctgccgacatggaagccatcacaaacggcatgatgaacctgaatcgccagcggcatcagcaccttgtcgccttgcgtataatatttgcccatagtgaaaacgggggcgaagaagttgtccatattggccacgtttaaatcaaaactggtgaaactcacccagggattggctgagacgaaaaacatattctcaataaaccctttagggaaataggccaggttttcaccgtaacacgccacatcttgcgaatatatgtgtagaaactgccggaaatcgtcgtggtattcactccagagcgatgaaaacgtttcagtttgctcatggaaaacggtgtaacaagggtgaacactatcccatatcaccagctcaccgtctttcattgccatacggaactccggatgagcattcatcaggcgggcaagaatgtgaataaaggccggataaaacttgtgcttatttttctttacggtctttaaaaaggccgtaatatccagctgaacggtctggttataggtacattgagcaactgactgaaatgcctcaaaatgttctttacgatgccattgggatatatcaacggtggtatatccagtgatttttttctccattttagcttccttagctcctgaaaatctcgataactcaaaaaatacgcccggtagtgatcttatttcattatggtgaaagttggaacctcttacgtgccaagccaaataggccgt

SEQ ID NO: 255 - DNA, 9523 bp, Artificial
  Synthetic
tcagatccttccgtatttagccagtatgttctctagtgtggttcgttgtttttgcgtgagccatgagaacgaaccattgagatcatgcttactttgcatgtcactcaaaaattttgcctcaaaactggtgagctgaatttttgcagttaaagcatcgtgtagtgtttttcttagtccgttacgtaggtaggaatctgatgtaatggttgttggtattttgtcaccattcatttttatctggttgttctcaagttcggttacgagatccatttgtctatctagttcaacttggaaaatcaacgtatcagtcgggcggcctcgcttatcaaccaccaatttcatattgctgtaagtgtttaaatctttacttattggtttcaaaacccattggttaagccttttaaactcatggtagttattttcaagcattaacatgaacttaaattcatcaaggctaatctctatatttgccttgtgagttttcttttgtgttagttcttttaataaccactcataaatcctcatagagtatttgttttcaaaagacttaacatgttccagattatattttatgaatttttttaactggaaaagataaggcaatatctcttcactaaaaactaattctaatttttcgcttgagaacttggcatagtttgtccactggaaaatcttaaagcctttaaccaaaggattcctgatttccacagttctcgtcatcagctctctggttgctttagctaatacaccataagcattttccctactgatgttcatcatctgagcgtattggttataagtgaacgataccgtccgttctttccttgtagggttttcaatcgtggggttgagtagtgccacacagcataaaattagcttggtttcatgctccgttaagtcatagcgactaatcgctagttcatttgctttgaaaacaactaattcagacatacatctcaattggtctaggtgattttaatcactataccaattgagatgggctagtcaatgataattactagtccttttcctttgagttgtgggtatctgtaaattctgctagacctttgctggaaaacttgtaaattctgctagaccctctgtaaattccgctagacctttgtgtgttttttttgtttatattcaagtggttataatttatagaataaagaaagaataaaaaaagataaaaagaatagatcccagccctgtgtataactcactactttagtcagttccgcagtattacaaaaggatgtcgcaaacgctgtttgctcctctacaaaacagaccttaaaaccctaaaggcttaagtagcaccctcgcaagctcgggcaaatcgctgaatattccttttgtctccgaccatcaggcacctgagtcgctgtctttttcgtgacattcagttcgctgcgctcacggctctggcagtgaatgggggtaaatggcactacaggcgccttttatggattcatgcaaggaaactacccataatacaagaaaagcccgtcacgggcttctcagggcgttttatggcgggtctgctatgtggtgctatctgactttttgctgttcagcagttcctgccctctgattttccagtctgaccacttcggattatcccgtgacaggtcattcagactggctaatgcacccagtaaggcagcggtatcatcaacaggcttacccgtcttactgtcaagaggacatccggtcaaataaaacgaaaggctcagtcgaaagactgggcctttcgttttgctgaggagacttagggaccctttatgacaacttgacggctacatcattcactttttcttcacaaccggcacggaactcgctcgggctggccccggtgcattttttaaatacccgcgagaaatagagttgatcgtcaaaaccaacattgcgaccgacggtggcgataggcatccgggtggtgctcaaaagcagcttcgcctggctgatacgttggtcctcgcgccagcttaagacgctaatccctaactgctggcggaaaagatgtgacagacgcgacggcgacaagcaaacatgctgtgcgacgctggcgatatcaaaattgctgtctgccaggtgatcgctgatgtactgacaagcctcgcgtacccgattatccatcggtggatggagcgactcgttaatcgcttccatgcgccgcagtaacaattgctcaagcagatttatcgccagcagctccgaatagcgcccttccccttgcccggcgttaatgatttgcccaaacaggtcgctgaaatgcggctggtgcgcttcatccgggcgaaagaaccccgtattggcaaatattgacggccagttaagccattcatgccagtaggcgcgcggacgaaagtaaacccactggtgataccattcgcgagcctccggatgacgaccgtagtgatgaatctctcctggcgggaacagcaaaatatcacccggtcggcaaacaaattctcgtccctgatttttcaccaccccctgaccgcgaatggtgagattgagaatataacctttcattcccagcggtcggtcgataaaaaaatcgagataaccgttggcctcaatcggcgttaaacccgccaccagatgggcattaaacgagtatcccggcagcaggggatcattttgcgcttcagccatacttttcatactcccaccattcagagaagaaaccaattgtccatattgcatcagacattgccgtcactgcgtcttttactggctcttctcgctaacccaaccggtaaccccgcttattaaaagcattctgtaacaaagcgggaccaaagccatgacaaaaacgcgtaacaaaagtgtctataatcacggcagaaaagtccacattgattatttgcacggcgtcacactttgctatgccatagcatttttatccataagattagcggatcctacctgacgctttttatcgcaactctctactgtttctccatacccgttttacctgcaggtgcagtccatgcacaatcagatttttatgtccgacctgcaaacctccaccccgaataccgaatcctttgcggctctgttcgaagagtcgctgacccgccaagacatgcgcgccggcgaagtgatttccgccgaagtcgtgcgcgtcgaccacaacttcgtggtcgtcaatgcaggcctgaagtccgaggcttacattccgatcgaggaattcctgaacgatcagggcgaggttgaggtgcagtcgggcgatttcgtgtccgtcgcgatcgacgcactcgaaaacggctatggcgacacgatcctgtcgcgcgacaaggcgaagcgccttgcatcgtggctgtcgctggaaaaggcgctcgacaacaacgagctcgtcaccggcacgatcaccggcaaggtgaagggcggcatgaccgtgatggtcaacggcatccgcgcgttcctgccgggttcgctggtcgacacgcgtccggtcaaggacacgaccccgtacgaaggcaagacgctcgagttccgcgtgatcaagctcgatcgcaagcgtaacaacgtcgtgctgtcgcgtcgtgcagtgatcgaagcaacgcaaggcgaagagcgcgcgaagctgctcgagacgctgaaggaaggcgcgatcgtcaacggcgtggtcaagaacatcaccgactacggcgcgttcgtcgacctcggcggtatcgacggcctgctgcacatcaccgacatcgcatggcgtcgtgtgcgtcacccgagcgaagtcctgtcggttggccaggaagtcaccgcgaagatcctcaagttcgaccaagagaagaaccgcgtctcgctgggcatcaagcaactgggcgacgatccgtgggaaggcatctcgcgccgttacccgtcgggcacgcgcctgttcggcaaggtcacgaacatcaccgactacggcgcattcgtcgaagtggaatcgggcatcgaaggcctcgtccacgtgtcggaaatggactggaccaacaagaacgttgcgccgtcgaaggttgtccagctgggcgacgaagtcgaagtcatggtcctcgagatcgacgaagaccgtcgtcgtatcagcctcggcatgaagcagtgcaagccgaatccgtgggatgacttcagccgcaacttcaagaagggcgacaagatcacgggcgcaatcaagtcgatcaccgacttcggcgtgttcatcggtctgccgggcggcatcgacggcttggtccacctgtcggacctgtcgtggagcgaagccggcgaagaagccgttcgcaagtacaagaagggcgacgaagtcgaagcaatcgtgctcggtatcgacgtcgagaaggagcgcatttcgctcggcatcaagcagctcgaaggcgacccgttcagcaactacgttgcaatgaacgacaagggctcgatcgtcgacggcgtcgtgaagacggtcgatgcgaagggtgcggtcgtcacgctgacgggcgacatcgaaggctacctgcgtgcgtcggaaatctcgcaggatcgcgtcgaagatgcacgcaacgtgctgaaggaaggcgacaaggtcaacgcgatggtgatcaacatcgatcgcaagtcgcgcggcatcaacctgtcgatcaaggcgaaggattcggccgaacaacaggaagcgatccgcggcctgcagtcggactccagcgctgctgcgaccggtacgaccaacctcggcgcgctgctgaaggcgaagctcgacggccagaaccagtaagccttacgtcagttagaaaggaaatcacatgtctgttgcagatatcaagaagtcggaagtcgttgctcagttcgcccgcggtaccaacgacacggggtcgcccgaagtccaggtcgcactgctgaccgcacgtatcgtcgaactgacgggtcacttcaagacccacgcgaaggatcaccacagccgccgcggcctgctgcgcatggtgagccgccgccgcaagctgctcgactacctcaagggcaaggatgccgaccgttaccgcgcactgatcgagaagctgggtctgcgtaagtaatcgaggtgggacaggataaggaaccgtcatggctaactccgcacaagcacgcaagcgcgcccgccaggccgcgaaggcaaactcgcacaactcggcgctgcgctcgaaattccgtaccgcgatcaagtcggttcgcaaggctgttgaagccggcgaccaggcaaaggctgccgagctgttcaaggctgccgtgaagacgatcgacacgatcgccgacaagaagatcgttcacaagaacaaggccgctcgcagcaagagccgcctggccgcagccgtcaagggcctgcaggcagcagcgtaactcaggtggttttcccgaaggacatcatatggttatcatccgtctggctcgtggcggctcgaagaagcgcccgttctacaacatcgttgctaccgattcgcgcaaccgtcgtgacggccgcttcatcgagcgcgtcggcttctacaacccggtcgccacgaagggcgaatcgctgcgtatcgctcaggatcgcctgacgtactggcaaggcgttggcgcgcaactgtcgccgaccgtccagcgtctcgtgaaggaagcgcaaaaggcgcaaccggctgcctaacatggcactaatccacaaggagtgtgtaatgcgtcattacgaaatcgtattcatcgtgcacccggatcaaagcgagcaggtgcccgcgatgatcgagcgttacaagaccacgatcacgacgcacggcggccagatccaccgtgtcgaagactggggccgtcgccagctggcctacatgatcgagaaactcgcgaaggctcactacgtctgcatgaacatcgagtgcgaccagacgacgctcgacgaactcgaacacgcgttcaagttcaacgacgccgtgctgcgtcacctcatcgtcaagatgaagaaggccgaaaccggcccgtcgccgatgatgaaggaagttcagcgcgaagaagccaagaaggcggctgcagctcagccggccgaagcgcaggcttaagttcgtcacacaggaaaggactgaaatcatggcccgcccgactggtaagaaattcgacaagcgtcgtcagcaacaaaacccgctcttcaagcgcaagaagttctgccgtttcacggctgccggcgtcgagcagatcgactacaaggacacggaaacgctgaaggacttcatcggcgaaaacggcaagatcacgccggctcgtctgacgggtacgaaggcgcactatcagcgtcagctggatacggccatcaagcgtgcgcgtttcctcgcgctgctgccgtacaccgatcagcacaaggcgtaatcaggcgacgcaataaggagaattcgaatgcaaatcattctgttggaaaaagtcgccaatctgggcaacctcggcgatatcgtcaaggtcaaggacggttacgctcgcaacttcctgatcccgaaccgcaaggctcgccgtgcaacgaaggaagcgatcgccgaattcgaagtgcgccgcgctgaactcgaaaagatcgccgctgaaaagctggccgcatcgcaggcagtcggcgagaagctgaacggtcagtcgttcgaaatcacgcagaagtcgggcgtcgacggccgtctgttcggctcggtcacgaacggcgacgtcgctgaactgctgaagaaggcaggctacgaagtcgagaagctgcaagtgcgcatgccggaaggcccgctgaagatgatcggcgagcacaacgtgcaagtcgcgctgcacacggacgtcgtcgtcgacgtcacgatcaacgtgatcggcgaccacgcgtaagcgaagacgcaatttttttggatcgatcatgaagacgttttccgcaaaagcccatgaggtgacgcgcgaatggtacgtgattgacgcgacggataaggttctcggccgtgttgccagcgaagtggcacgccgtctgcgcggcaagcacaagcctgagttcaccccgcacgtcgacactggtgatttcatcatcatcatcaacgcgagcaagttgaaggtcacgggcaacaagacgctggacaagaagtactaccgtcactcgggctacccgggcggtatctatgaaacgacgttcggcaagatgcaagagcgcttcccgggccgcgcgctcgagaaggcggtcaagggcatgctgccgaagggcccgctcggctacgcgatgatcaagaagctgaaggtctacgcagaagcgacgcatccgcactcggctcaacagccgaaggcgctcgagatctaaggggacccacatgatcggtaactggaactacggtacgggccgccgcaagagcgcagtcgcacgtgtcttcatcaaggctggcaagggcgacatcatcgtcaacggcaagcccatcgctgactacttctcgcgcgaaacgtcgctgatgatcgtgcgtcaaccgctggaactcacgaaccacggccagacgttcgacatcaaggtgaacgtcaacggcggcggcgaaacgggtcaggcaggcgcagtgcgccacggcatcacccgtgcactgatcgactacgatgcgacgctgaagccgtcgctgtcgagcgcaggcttcgtcacgcgcgatgcgcgtgaagtcgagcgtaagaaggtcggtctgcgcaaggcacgccgcgcaaagcagttctcgaagcgttaattccggttttaagcaatttaggaacgacatgacgacgattcttctgaaagaaaacgagccgttcgaagtggcgattcgccgctttcgtcgcgctatcgaaaaaaatggcctgatcgctgaactgcgtgagcgccagtcttacgaaaagccgaccgcagtccgcaagcgcaagaaggcagcagccgtcaagcgcctgcacaagcgcctgcgcagccagatgctgccgaagaagctccactaagagcgtctaaccctcgtggagaatttacatggcagttacgatgcgccaaatgctggaagcgggtgtccacttcggtcaccagacgcgcttctggaacccgaagatggctccgttcattttcggtcaccgcaacaagattcacatcatcaacctcgaaaagacgctgccgatgttcacggacgcacagaagtacgtgcgccagctggcagcgaaccgcggcacgatcctgttcgtcggcacgaagcgccagtcgcgtgacacgatcgcccaggaagcgcaacgtgcgggcatgccgtacgtcaacgcacgctggctcggcggcatgatgaccaacttcaagacgctgaaggtatcgatcaagcgcctgaaggacatggaagcggccgtcgaatcgggcgaaaccgagaagatgagcaagaaggaagcgctgctgttcgaacgcgaaatcgccaagctgcagaagtcgatcggcggcgtgaaggacatgggcggcattccggacgcaattttcgtcgtcgacgtcggctaccacaagatcgccgtcacggaagcgaacaagctgggcgtgccggtcatcgccgtggtcgatacgaaccactcgccggaaggtgtggattacgtgatcccgggtaacgacgactcgagcaaggcagtcgcgctgtacgccgaaggcgtggccgacgcgatcctcgaaggccgcgcgaacgcggtcaacgaagtggtccaggccgcacgcggcgacgacgagtacgtcgaggaaaacgcgtaactggccccacttaattaacggcactcctcagccaagtcaaaagcctccggtcggaggcttttgactacatgcccatggcgtttacgccccgccctgccactcatcgcagtactgttgtaattcattaagcattctgccgacatggaagccatcacaaacggcatgatgaacctgaatcgccagcggcatcagcaccttgtcgccttgcgtataatatttgcccatagtgaaaacgggggcgaagaagttgtccatattggccacgtttaaatcaaaactggtgaaactcacccagggattggctgagacgaaaaacatattctcaataaaccctttagggaaataggccaggttttcaccgtaacacgccacatcttgcgaatatatgtgtagaaactgccggaaatcgtcgtggtattcactccagagcgatgaaaacgtttcagtttgctcatggaaaacggtgtaacaagggtgaacactatcccatatcaccagctcaccgtctttcattgccatacggaactccggatgagcattcatcaggcgggcaagaatgtgaataaaggccggataaaacttgtgcttatttttctttacggtctttaaaaaggccgtaatatccagctgaacggtctggttataggtacattgagcaactgactgaaatgcctcaaaatgttctttacgatgccattgggatatatcaacggtggtatatccagtgatttttttctccattttagcttccttagctcctgaaaatctcgataactcaaaaaatacgcccggtagtgatcttatttcattatggtgaaagttggaacctcttacgtgccaagccaaataggccgt

SEQ ID NO: 256 - DNA, 7255 bp, Artificial
  Synthetic
tcagatccttccgtatttagccagtatgttctctagtgtggttcgttgtttttgcgtgagccatgagaacgaaccattgagatcatgcttactttgcatgtcactcaaaaattttgcctcaaaactggtgagctgaatttttgcagttaaagcatcgtgtagtgtttttcttagtccgttacgtaggtaggaatctgatgtaatggttgttggtattttgtcaccattcatttttatctggttgttctcaagttcggttacgagatccatttgtctatctagttcaacttggaaaatcaacgtatcagtcgggcggcctcgcttatcaaccaccaatttcatattgctgtaagtgtttaaatctttacttattggtttcaaaacccattggttaagccttttaaactcatggtagttattttcaagcattaacatgaacttaaattcatcaaggctaatctctatatttgccttgtgagttttcttttgtgttagttcttttaataaccactcataaatcctcatagagtatttgttttcaaaagacttaacatgttccagattatattttatgaatttttttaactggaaaagataaggcaatatctcttcactaaaaactaattctaatttttcgcttgagaacttggcatagtttgtccactggaaaatcttaaagcctttaaccaaaggattcctgatttccacagttctcgtcatcagctctctggttgctttagctaatacaccataagcattttccctactgatgttcatcatctgagcgtattggttataagtgaacgataccgtccgttctttccttgtagggttttcaatcgtggggttgagtagtgccacacagcataaaattagcttggtttcatgctccgttaagtcatagcgactaatcgctagttcatttgctttgaaaacaactaattcagacatacatctcaattggtctaggtgattttaatcactataccaattgagatgggctagtcaatgataattactagtccttttcctttgagttgtgggtatctgtaaattctgctagacctttgctggaaaacttgtaaattctgctagaccctctgtaaattccgctagacctttgtgtgttttttttgtttatattcaagtggttataatttatagaataaagaaagaataaaaaaagataaaaagaatagatcccagccctgtgtataactcactactttagtcagttccgcagtattacaaaaggatgtcgcaaacgctgtttgctcctctacaaaacagaccttaaaaccctaaaggcttaagtagcaccctcgcaagctcgggcaaatcgctgaatattccttttgtctccgaccatcaggcacctgagtcgctgtctttttcgtgacattcagttcgctgcgctcacggctctggcagtgaatgggggtaaatggcactacaggcgccttttatggattcatgcaaggaaactacccataatacaagaaaagcccgtcacgggcttctcagggcgttttatggcgggtctgctatgtggtgctatctgactttttgctgttcagcagttcctgccctctgattttccagtctgaccacttcggattatcccgtgacaggtcattcagactggctaatgcacccagtaaggcagcggtatcatcaacaggcttacccgtcttactgtcaagaggacatccggtcaaataaaacgaaaggctcagtcgaaagactgggcctttcgttttgctgaggagacttagggaccctttatgacaacttgacggctacatcattcactttttcttcacaaccggcacggaactcgctcgggctggccccggtgcattttttaaatacccgcgagaaatagagttgatcgtcaaaaccaacattgcgaccgacggtggcgataggcatccgggtggtgctcaaaagcagcttcgcctggctgatacgttggtcctcgcgccagcttaagacgctaatccctaactgctggcggaaaagatgtgacagacgcgacggcgacaagcaaacatgctgtgcgacgctggcgatatcaaaattgctgtctgccaggtgatcgctgatgtactgacaagcctcgcgtacccgattatccatcggtggatggagcgactcgttaatcgcttccatgcgccgcagtaacaattgctcaagcagatttatcgccagcagctccgaatagcgcccttccccttgcccggcgttaatgatttgcccaaacaggtcgctgaaatgcggctggtgcgcttcatccgggcgaaagaaccccgtattggcaaatattgacggccagttaagccattcatgccagtaggcgcgcggacgaaagtaaacccactggtgataccattcgcgagcctccggatgacgaccgtagtgatgaatctctcctggcgggaacagcaaaatatcacccggtcggcaaacaaattctcgtccctgatttttcaccaccccctgaccgcgaatggtgagattgagaatataacctttcattcccagcggtcggtcgataaaaaaatcgagataaccgttggcctcaatcggcgttaaacccgccaccagatgggcattaaacgagtatcccggcagcaggggatcattttgcgcttcagccatacttttcatactcccaccattcagagaagaaaccaattgtccatattgcatcagacattgccgtcactgcgtcttttactggctcttctcgctaacccaaccggtaaccccgcttattaaaagcattctgtaacaaagcgggaccaaagccatgacaaaaacgcgtaacaaaagtgtctataatcacggcagaaaagtccacattgattatttgcacggcgtcacactttgctatgccatagcatttttatccataagattagcggatcctacctgacgctttttatcgcaactctctactgtttctccatacccgttttacctgcaggtgcagtgatggcataaggagtcagtaatgaatctgatcgcaaaacttgagcaggaagaaatcgagcgcgcgctcgccggcaagaccatccccgatttcgccccgggcgacacggtgatcgtgaacgtgaacgtggttgaaggtaaccgcaagcgcgttcaggcttacgaaggcgtcgtgatcgcgattcgcaatcgtggtctgaactcgaacttcatcgtccgcaagatctcgtcgggcgaaggcgtcgagcgtacgttccagacgtactcgccgctgctggcaagcatcgtcgtgaagcgtcgcggtgatgtgcgtcgtgcgaagctgtactacctgcgcgagcgttcgggcaagtcggctcgtatcaaggaaaagctggtgtcgaaggatcgcgccgcagcagcttcccaagagtaagagctgtaataaactggagttgttcgtcatgcctaagatgaagaccaagaagagcgctgcaaagcgcttcgtggtgcgtccgggcggtaccgtcaagcgcggtcaagccttcaagcgtcacatcctgaccaagaaaaccacgaagaacaagcgccatctgcgcggcgcaacggcagttcatgattccgatctgaactccgtccgcgcgatgctcccgttcgcgtaacccctcaactgatactccaaggagagaaacatgcctcgagtcaaacgtggggtaaccgcacgggcccgccacaagaagatcatcaacctggccaagggttatcgcggccgccgcaataacgtctaccgcatcgccaagcaggcggtgatgcgcgctggtcagtacgcgtaccgcgatcgccgcaacaagaagcgtgtgttccgcgcactgtggatcacgcgtatcaacgcggcagttcgccagcacgacatgacctacagcgtgttcatcaacggcctgaagaaggcgtcgatcgaactcgaccgtaaggtcctggccgacatggcggtgttcgacaaggctgcttttgctgcgatcgtcaagcaggtgaaagccgccgttgcagcctaattgcgaaagatccagagtgaggttctcaatgtacgcggtcataaaaaccggcggcaagcagtacaaggttgccgttggcgaaaaactcaaagtagaacagataccggctgacattgacgctgaaatcacgctcgaccaggttctcgcagtgggcgaaggcgaatcgattaagttcggtacgccgctggtcagtggggcttccgtcaaggccaccgttgtgtcgcacggtcgtcatgccaaggtcaccatcttcaagatgcgtcgccggaagcactaccaaaagcacggcggccaccgccagaactacactgagctgcgcatcgacgcgatcaacgcgtaagcgcctcggtaaaggagcaatcagatggcacacaaaaaggcaggcggctcttcccggaacggccgcgactccgagtcgaaacgtctcggcgtgaaagtgtacggcggccaggcaatcaatgccggcggcatcatcgtgcgtcagcgcggtacgcgcatgcacgcaggcgagaacgtcggcatgggcaaggatcacaccctgttcgcgctggtcgacggtcacgtcaagttcgcgacgaagggcgcggacaagaagcatctggtcatcgtcgtcccggcggctgcctaagtcaggcaaacagcaaatggagaatcacatgaaagtcgtcgctttcgagcgccaacagcaaggtacgggtgcgagccgccgcctgcgcaacgccggtaagaccacgggtatcgtctacggtggcgaagcagccccgcaaaagatcgaactggatcacaacgcgctgtggcatgcactgaagaaggaagccttccactcgtcgatcctcgacctggaagtggctggccagtcgcaacaggttctgctgcgcgacgtgcaataccacccgttcaagcaactcgtgctgcacgttgacttccagcgcgtcgacgcgaagaagaagctgcacacgaaggcaccgctgcacttcctgaacgcagaagtcagcccggccgtgaagctgtcgagcgcgatcgtttcgcacgtcgcgacggaaatcgaaatcgagtgcctgccggccgacctgccggaattcctcgaagtcgacctgtcgaagatcgaagccggtcagtcgctgcacgcgaaggacatcgcactgccgaagggcgtcgcgctggtcgcgcacgtcgacgcggaaaacccggtcatcgcttcggcgacggtcccggctggcgccgtgtcggacgcagcagaaggcgaaacgccggctgcctaagcggcttcagcgtattaggagtgctctcatggcacgcgtatgccaagtaactgggaaagcgccgatgagcggcaacaacgtttcccacgccaacaacaagacgaagcgccgcttcctcccgaacctgcaaaaccgccggttctgggttgagagcgaaaaccgctgggtgcgcctgcgcgtctcgaacgccggcctgcgcctgatcgacaagaacggcatcgattccgtgctcgctgacctgcgcgcacgcggcgaagcctaagcccaaggagcacaatcatggcaaaaggcgcccgcgacaagatcaagcttgagtcgaccgctggtacgggtcacttctacacgaccacgaagaacaagcgcaacatgccggaaaagatggcgatcaagaagttcgatcccgtcgtccgcaagcatgtggaatacaaagaaaccaagatcaagtaatctccgctcgctatcaccaaggaaaatcatgaaacctggcattcacccggactaccgcgaagtcgtcttccaagacatgtcgaacggcttcaagttcatcacgcgctcgacgatccagacgcgtgaaaccatcgaacacgaaggcaagacctacccgctcgccaagatcgaagtgtcgtcggaatcgcactcgttctacacgggtcagcaaaagatcatggacacggcaggccgtgtcgagaagttcaagaacaagttcggcgcacgcgccaacggcaaggctgcagcaaagtaagccttacaaaattatttaggagttagtcatggcagtccagcaaaacaagaagtcgccgtcgaagcgcggcatgcatcgttcgcacgatttcctgacggcagcgccgctggcagtcgagccgagcacgggtgaagtgcacctgcgtcaccacgtcagcccgaacggctactatcgcggcaagaaagtcgtcaagacgaagaacgactaagcgtcaagctcgaacaagtgagaacatcatgaaacgtacttaccaaccgtccgtgacgcgccgcaagcgcacccatggcttccgtgtccgcatgaagacggcaggtggccgcaaggtcatcaacgctcgccgcgcgaagggccgtaagcgcctcgccatctaaggcaggttacttaattaacggcactcctcagccaagtcaaaagcctccggtcggaggcttttgactacatgcccatggcgtttacgccccgccctgccactcatcgcagtactgttgtaattcattaagcattctgccgacatggaagccatcacaaacggcatgatgaacctgaatcgccagcggcatcagcaccttgtcgccttgcgtataatatttgcccatagtgaaaacgggggcgaagaagttgtccatattggccacgtttaaatcaaaactggtgaaactcacccagggattggctgagacgaaaaacatattctcaataaaccctttagggaaataggccaggttttcaccgtaacacgccacatcttgcgaatatatgtgtagaaactgccggaaatcgtcgtggtattcactccagagcgatgaaaacgtttcagtttgctcatggaaaacggtgtaacaagggtgaacactatcccatatcaccagctcaccgtctttcattgccatacggaactccggatgagcattcatcaggcgggcaagaatgtgaataaaggccggataaaacttgtgcttatttttctttacggtctttaaaaaggccgtaatatccagctgaacggtctggttataggtacattgagcaactgactgaaatgcctcaaaatgttctttacgatgccattgggatatatcaacggtggtatatccagtgatttttttctccattttagcttccttagctcctgaaaatctcgataactcaaaaaatacgcccggtagtgatcttatttcattatggtgaaagttggaacctcttacgtgccaagccaaataggccgt

SEQ ID NO: 257 - DNA, 8809 bp, Artificial
  Synthetic
tcagatccttccgtatttagccagtatgttctctagtgtggttcgttgtttttgcgtgagccatgagaacgaaccattgagatcatgcttactttgcatgtcactcaaaaattttgcctcaaaactggtgagctgaatttttgcagttaaagcatcgtgtagtgtttttcttagtccgttacgtaggtaggaatctgatgtaatggttgttggtattttgtcaccattcatttttatctggttgttctcaagttcggttacgagatccatttgtctatctagttcaacttggaaaatcaacgtatcagtcgggcggcctcgcttatcaaccaccaatttcatattgctgtaagtgtttaaatctttacttattggtttcaaaacccattggttaagccttttaaactcatggtagttattttcaagcattaacatgaacttaaattcatcaaggctaatctctatatttgccttgtgagttttcttttgtgttagttcttttaataaccactcataaatcctcatagagtatttgttttcaaaagacttaacatgttccagattatattttatgaatttttttaactggaaaagataaggcaatatctcttcactaaaaactaattctaatttttcgcttgagaacttggcatagtttgtccactggaaaatcttaaagcctttaaccaaaggattcctgatttccacagttctcgtcatcagctctctggttgctttagctaatacaccataagcattttccctactgatgttcatcatctgagcgtattggttataagtgaacgataccgtccgttctttccttgtagggttttcaatcgtggggttgagtagtgccacacagcataaaattagcttggtttcatgctccgttaagtcatagcgactaatcgctagttcatttgctttgaaaacaactaattcagacatacatctcaattggtctaggtgattttaatcactataccaattgagatgggctagtcaatgataattactagtccttttcctttgagttgtgggtatctgtaaattctgctagacctttgctggaaaacttgtaaattctgctagaccctctgtaaattccgctagacctttgtgtgttttttttgtttatattcaagtggttataatttatagaataaagaaagaataaaaaaagataaaaagaatagatcccagccctgtgtataactcactactttagtcagttccgcagtattacaaaaggatgtcgcaaacgctgtttgctcctctacaaaacagaccttaaaaccctaaaggcttaagtagcaccctcgcaagctcgggcaaatcgctgaatattccttttgtctccgaccatcaggcacctgagtcgctgtctttttcgtgacattcagttcgctgcgctcacggctctggcagtgaatgggggtaaatggcactacaggcgccttttatggattcatgcaaggaaactacccataatacaagaaaagcccgtcacgggcttctcagggcgttttatggcgggtctgctatgtggtgctatctgactttttgctgttcagcagttcctgccctctgattttccagtctgaccacttcggattatcccgtgacaggtcattcagactggctaatgcacccagtaaggcagcggtatcatcaacaggcttacccgtcttactgtcaagaggacatccggtcaaataaaacgaaaggctcagtcgaaagactgggcctttcgttttgctgaggagacttagggaccctttatgacaacttgacggctacatcattcactttttcttcacaaccggcacggaactcgctcgggctggccccggtgcattttttaaatacccgcgagaaatagagttgatcgtcaaaaccaacattgcgaccgacggtggcgataggcatccgggtggtgctcaaaagcagcttcgcctggctgatacgttggtcctcgcgccagcttaagacgctaatccctaactgctggcggaaaagatgtgacagacgcgacggcgacaagcaaacatgctgtgcgacgctggcgatatcaaaattgctgtctgccaggtgatcgctgatgtactgacaagcctcgcgtacccgattatccatcggtggatggagcgactcgttaatcgcttccatgcgccgcagtaacaattgctcaagcagatttatcgccagcagctccgaatagcgcccttccccttgcccggcgttaatgatttgcccaaacaggtcgctgaaatgcggctggtgcgcttcatccgggcgaaagaaccccgtattggcaaatattgacggccagttaagccattcatgccagtaggcgcgcggacgaaagtaaacccactggtgataccattcgcgagcctccggatgacgaccgtagtgatgaatctctcctggcgggaacagcaaaatatcacccggtcggcaaacaaattctcgtccctgatttttcaccaccccctgaccgcgaatggtgagattgagaatataacctttcattcccagcggtcggtcgataaaaaaatcgagataaccgttggcctcaatcggcgttaaacccgccaccagatgggcattaaacgagtatcccggcagcaggggatcattttgcgcttcagccatacttttcatactcccaccattcagagaagaaaccaattgtccatattgcatcagacattgccgtcactgcgtcttttactggctcttctcgctaacccaaccggtaaccccgcttattaaaagcattctgtaacaaagcgggaccaaagccatgacaaaaacgcgtaacaaaagtgtctataatcacggcagaaaagtccacattgattatttgcacggcgtcacactttgctatgccatagcatttttatccataagattagcggatcctacctgacgctttttatcgcaactctctactgtttctccatacccgttttacctgcaggtgcagttttcgattggagcttaatcgatgccaaatcaaagaattcgcattcgtttgaaagcgtttgatcacaagttgatcgatcagtctacggctgaaatcgttgaaactgcgaaacgcactggtgctcaggtaagtggtcctattcctctacctactcgcaaagaacgctatacagttctgatttctccgcacgttaacaaagacgcgcgtgatcaatatgaaatccgtactcacaagcgtttggtagacatcatcgagccaactgataaaacagttgacgcgttgatgcgtttggacttggctgctggcgttgatgttcaaatcagcctgggctaataagagagggttataacaatggcgattggtctagtcggtcgtaaagtgggtatgactcgcatcttcactgaagatggtacgtctatccctgtgactgttattgaagcgaccccaaaccgcgttactcagcttcgtactgaggaaactgacggttatcgcgctcttcaggttactgctggaactaagaaagctaaccgcatcaacaaagctgaagcaggtcactttgctaaagctggtgttgaagctggacgcactctagtagaattccgcctagaagaaaacgaaggtgccgatattgaagtaggcagtgaaatcactgttgaaatctttaacgacactaagaaaattgatgtaactggtacatcaaaaggtaaaggtttccaaggtgctatcaagcgctggaacttcagttctcagcgtatgacacacggtaactctttgtcacaccgtgctcctggttcaattggtcaaaaccaatcaccaggtaaagtattcaaaggcaagaaaatggctggtcagcttggtaacaagcaagtgactactcagtctttggaagttgtacgtgttgacgtagagaacggccttatcctagttaaaggtgccgtacctggcgcaactggcaacgatgtaatcgtaaagccagctgttaaagcgtaacgtctggggagtgaactgatggaattaacattgaaagacgcgcaaagcgctcttgaagtatccgaagcgacctttggacgtgaattcaacgaagccctggtacaccaggtagttgtagcttacggtgcaggtgctcgtcagggtacaaaagcgcagaaaactcgcgctgaagttcgtggtggcggtaagaagccatggcgtcaaaaaggtactggccgtgctcgtgctggtacaatccgtagcccaatttgggttggcggtggccgtgctttcgcagcaaagcctcgtgactttgaccaaaaagttaacaagaaaatgtatcgcggtgcgatcaagagcatcctgtctgaactaatccgtcaagaccgtttggttgttgtagagaagttcggtgttgacgcacctaagactaaagctcttatttctgcacttaacgaatatgaactaaatgacgttctaatcgttactcctgaagttgatgagaacttgttcctagcggcgcgcaacttgtacaaagttgacgtacgtgacgtagcaggcatcgacccagtgagcttgattgcatttgaaaaagtgctaatgactgctgatgcggttaaacaacttgaggaggcgttagcatgaaagaagaacgtctactgaaggtgctagtagcacctcacgtttcagaaaagtctacaatggctgctgaagcgaacaacacagttgtatttaaagtagctaaagacgcgaacaaagccgaaatcaaagctgcagttgaaaaactgtttgaagttgaagttgaaggtgttcgtactgtgaacgttaagggtaaaaccaagcgtcacggcatgtctttcggtaagcgcagcgactggaaaaaggcctacgtggttcttaaagaaggtcaggacatcgactttgtcggtggtgctgagtaagaaggggattagaaatgccattattgaaagctaagccaacttctgccggtcgtcgtcacgttgttcaggtcgtaaatcctgacctgcacaaaggtgcaccgtacgcacctttgcttgaaaagaacagcaaatctggcggtcgtaacaacaatggtcgtattaccactcgtcacattggtggtggtcataagcaacactaccgtgtaatcgactttaaacgcaacaaagacggcattccagctaaagttgagcgtttagaatacgatccaaaccgttctgcaaacattgcactagtattgtacgcagacggtgaacgtcgttacattctggctcctaagggtatgcaagcaggtgatgcaatccagtctggttcggacgctccgatcaagtctggtaacactctacctatgcgcaacatcccagtaggtactgttgtacacgcaattgaaatgaagcctggcaaaggtgcgcaaatcgcacgttctgctggtgcttatgctcagatcctagcacgtgacggaaactacgttaccctacgtctacgctctggcgaaatgcgtaaagttctatctgattgccgcgccactatcggtgaagttggcaatgcagagcacatgcttcgttcactaggtaaagctggtgctacacgctggcgtggtgttcgtcctaccgttcgtggtgttgccatgaacccggttgatcacccacacggtggtggtgaaggtcgtacatcaggcggtcgtcacccagtaactccttggggtattcctactaaaggtaagaaaacccgaagcaacaagcgtactgataagcttatcgtacgtcgtcgtaacaagtaatagcgaggattcaccatgccacgttctctcaagaaaggtccttttattgaccttcacttgctgaagaaggtagaggctgcagtggaaaagaacgaacgtaaaccaatcaaaacttggtctcgtcgttctatgatcatcccagatatgattgggttgaccattgcggtccataacggtcgacaacatgtacctgtcattattagtgacgaaatggtcggccacaagttgggcgaatttgcgccaacgcgtacttaccgcggccatgtcgcggataagaaagctaaacgttaaggggtaggaagatggaagcattagctaaacaccgttttgcccgcacgtcggctcaaaaggcacgcttggttgcggatcaaattcgcggaatgcacgttgagaaagctcttgagcttcttgcgtacagcccgaagaaaagcgcagcgctagtaaagaaagtattggaatctgcgattgctaacgcagagcacaacgaaggcgcagacatcgacgaattacgcgtgtctaaagttttcgttgacgaaggtccaactatgaaacgtatcaagccacgtgctaaaggccgtgctgatcgtatcttcaagcgcagcagtcacatcactgtggttgtagcggataactaggagtagataatgggacagaaggtacatcctacaggtatacgcctgggtatcagcaaaccatggacatctacctggtacgctaatactgcagactatgcagacaacctgtataacgatcatcaggtacgtcagtatctgactaagcaacttaagaacgcttcactttctaagatcgtgatcgagcgtcctgctaagagcatccgtgtgactattcacactgctcgtccaggcgttgtaatcggtaagaaaggtgaagacgtagaaaagctgcgtaactacgtatctaagctagccggcgtgccagctcagatcaacatcgctgaagtacgtaagccagagctagatggccagctagtagctgatagcatctctagccagctagagcgtcgtgttatgttccgtcgtgcgatgaagcgcgcagtacaaaacgcaatgcgtctaggcgcgaaaggtatcaaagttgaagttagcggccgtttgggcggtgcagagattgcacgttctgaatggtaccgtgaaggtcgcgttcctctgcacactttccgtgcggacatcgattacgcaacctctgaagcgtcaactacttacggtatcatcggcgttaaagtatggatcttcaaaggtgaagttctaggtggtctacctacaactcaagagcaagcaccagctgctcaacctaagaagaaaggccgcaacgctaagcgagagggctaatcatgttacaaccaaaacgcatgaagttccgtaagatgcacaaaggccgcaaccgcggcttagcagcgggtaatactgttgcctttggtacttacggccttaaagcagttggccgtggtcgaatgactgcgcgtcaaatcgaagcagcgcgtcgtgctatgactcgtcacgttaagcgtcaaggtaaaatttggattcgagttttccctgacaagccaattactgagaagcctctagaagtgcgtcaaggtaaaggtaaaggtaacgttgagtactgggtatgccaaattcagcctggtcgtgttctttatgagatggaaggtgttcctgaaaatcttgcacgcgaagcgtttgaattggcagcggctaaactgccatttaaaacaacctttgtaactcggacggtgatgtaatgaaagcgactgaactgaaagaaaagagcgtagaagagctgaacgcagagttgattaacctgctacgcgaacagttcaacctacgcatgcagcacacaacaggtcagcttgaaaaaactgatcagttgagaaaagtacgtcgtaacatcgcgcgtgttaaaaccattctgactcaaaaggctgatgcgtaatgactgagcaaaaaattcgtacagtacaaggtcgtgtggttagcaacaagatggataagtctatcactgttgtagttgaacgttttgttaagcacccaatctacgggaagttcatcaagcgctctactaagcttcacgcccacgacgaaaacaacgtatgcaataaaggtgacgtagtaacagtacgtgaatgtcgcccactatctaagagcaaatcttggatgctagttgacgttgttgagaaagctggcgtttaatcgctaacacttaattaacggcactcctcagccaagtcaaaagcctccggtcggaggcttttgactacatgcccatggcgtttacgccccgccctgccactcatcgcagtactgttgtaattcattaagcattctgccgacatggaagccatcacaaacggcatgatgaacctgaatcgccagcggcatcagcaccttgtcgccttgcgtataatatttgcccatagtgaaaacgggggcgaagaagttgtccatattggccacgtttaaatcaaaactggtgaaactcacccagggattggctgagacgaaaaacatattctcaataaaccctttagggaaataggccaggttttcaccgtaacacgccacatcttgcgaatatatgtgtagaaactgccggaaatcgtcgtggtattcactccagagcgatgaaaacgtttcagtttgctcatggaaaacggtgtaacaagggtgaacactatcccatatcaccagctcaccgtctttcattgccatacggaactccggatgagcattcatcaggcgggcaagaatgtgaataaaggccggataaaacttgtgcttatttttctttacggtctttaaaaaggccgtaatatccagctgaacggtctggttataggtacattgagcaactgactgaaatgcctcaaaatgttctttacgatgccattgggatatatcaacggtggtatatccagtgatttttttctccattttagcttccttagctcctgaaaatctcgataactcaaaaaatacgcccggtagtgatcttatttcattatggtgaaagttggaacctcttacgtgccaagccaaataggccgt

SEQ ID NO: 258 - DNA, 7895 bp, Artificial
  Synthetic
tcagatccttccgtatttagccagtatgttctctagtgtggttcgttgtttttgcgtgagccatgagaacgaaccattgagatcatgcttactttgcatgtcactcaaaaattttgcctcaaaactggtgagctgaatttttgcagttaaagcatcgtgtagtgtttttcttagtccgttacgtaggtaggaatctgatgtaatggttgttggtattttgtcaccattcatttttatctggttgttctcaagttcggttacgagatccatttgtctatctagttcaacttggaaaatcaacgtatcagtcgggcggcctcgcttatcaaccaccaatttcatattgctgtaagtgtttaaatctttacttattggtttcaaaacccattggttaagccttttaaactcatggtagttattttcaagcattaacatgaacttaaattcatcaaggctaatctctatatttgccttgtgagttttcttttgtgttagttcttttaataaccactcataaatcctcatagagtatttgttttcaaaagacttaacatgttccagattatattttatgaatttttttaactggaaaagataaggcaatatctcttcactaaaaactaattctaatttttcgcttgagaacttggcatagtttgtccactggaaaatcttaaagcctttaaccaaaggattcctgatttccacagttctcgtcatcagctctctggttgctttagctaatacaccataagcattttccctactgatgttcatcatctgagcgtattggttataagtgaacgataccgtccgttctttccttgtagggttttcaatcgtggggttgagtagtgccacacagcataaaattagcttggtttcatgctccgttaagtcatagcgactaatcgctagttcatttgctttgaaaacaactaattcagacatacatctcaattggtctaggtgattttaatcactataccaattgagatgggctagtcaatgataattactagtccttttcctttgagttgtgggtatctgtaaattctgctagacctttgctggaaaacttgtaaattctgctagaccctctgtaaattccgctagacctttgtgtgttttttttgtttatattcaagtggttataatttatagaataaagaaagaataaaaaaagataaaaagaatagatcccagccctgtgtataactcactactttagtcagttccgcagtattacaaaaggatgtcgcaaacgctgtttgctcctctacaaaacagaccttaaaaccctaaaggcttaagtagcaccctcgcaagctcgggcaaatcgctgaatattccttttgtctccgaccatcaggcacctgagtcgctgtctttttcgtgacattcagttcgctgcgctcacggctctggcagtgaatgggggtaaatggcactacaggcgccttttatggattcatgcaaggaaactacccataatacaagaaaagcccgtcacgggcttctcagggcgttttatggcgggtctgctatgtggtgctatctgactttttgctgttcagcagttcctgccctctgattttccagtctgaccacttcggattatcccgtgacaggtcattcagactggctaatgcacccagtaaggcagcggtatcatcaacaggcttacccgtcttactgtcaagaggacatccggtcaaataaaacgaaaggctcagtcgaaagactgggcctttcgttttgctgaggagacttagggaccctttatgacaacttgacggctacatcattcactttttcttcacaaccggcacggaactcgctcgggctggccccggtgcattttttaaatacccgcgagaaatagagttgatcgtcaaaaccaacattgcgaccgacggtggcgataggcatccgggtggtgctcaaaagcagcttcgcctggctgatacgttggtcctcgcgccagcttaagacgctaatccctaactgctggcggaaaagatgtgacagacgcgacggcgacaagcaaacatgctgtgcgacgctggcgatatcaaaattgctgtctgccaggtgatcgctgatgtactgacaagcctcgcgtacccgattatccatcggtggatggagcgactcgttaatcgcttccatgcgccgcagtaacaattgctcaagcagatttatcgccagcagctccgaatagcgcccttccccttgcccggcgttaatgatttgcccaaacaggtcgctgaaatgcggctggtgcgcttcatccgggcgaaagaaccccgtattggcaaatattgacggccagttaagccattcatgccagtaggcgcgcggacgaaagtaaacccactggtgataccattcgcgagcctccggatgacgaccgtagtgatgaatctctcctggcgggaacagcaaaatatcacccggtcggcaaacaaattctcgtccctgatttttcaccaccccctgaccgcgaatggtgagattgagaatataacctttcattcccagcggtcggtcgataaaaaaatcgagataaccgttggcctcaatcggcgttaaacccgccaccagatgggcattaaacgagtatcccggcagcaggggatcattttgcgcttcagccatacttttcatactcccaccattcagagaagaaaccaattgtccatattgcatcagacattgccgtcactgcgtcttttactggctcttctcgctaacccaaccggtaaccccgcttattaaaagcattctgtaacaaagcgggaccaaagccatgacaaaaacgcgtaacaaaagtgtctataatcacggcagaaaagtccacattgattatttgcacggcgtcacactttgctatgccatagcatttttatccataagattagcggatcctacctgacgctttttatcgcaactctctactgtttctccatacccgttttacctgcaggtgcagttttaagagcggagcactaacatgatccaaatgcaaactaacctggacgttgcagacaacagcggcgctcgcagggttcagtgtattaaggttcttggtggctcgcatcgccgttatgcaggtatcggtgacatcatcaaagttactgttaaggaagcaattcctcgcggtaaagttaaaaaaggtgacgtactgaatgcagtggtggtgcgtactagaaaaggcgttcgtcgtgcagatggttctaccattcgttttgacggtaacgcggctgttatgcttaatgctaacaagcaaccaattggtacgcgtatctttggcccggttacccgtgagttgagaagtgaaaacttcatgaaaatcatctcattggccccagaggtactataaggagtcacgataatggctaataaaattcgtcgtgatgatgaagtagtcgtattagcgggtaaagacaaaggcaaacaaggcaaagtccttaaagtgcttattgctgataaccgtgtaattgtagaaggcgttaatctcgttaagaagcacactaagccaaacccacaactgggcgtagctggtggcatcgttgagaaagaagcttctattcacgtttctaatgttgcgattgttaacccggcaacgggcaaagcagatcgcgttggtttccgtttcgaagatgagaagaaagtacgtttcttcaagtctaacggcgaacttgtttaattatattggagagtacgatggcgaaactgcatgatttctataaagaaacagtagtagctgaacttgctaagcagttcggatacaaaagcgtcatgcaagtccctcggattgaaaaaatcactctaaacatgggtttaggtgaagcagttgctgacaaaaaggtacttgagaatgctcaagctgacatgacggctatcgccggtcagaagcctgttgttacagttgctagaaaatcagtagcgggttttaaaatccgtgaaggttatccgattggctgtaaagtaaccctacgcggcgagcgtatgtgggaattcctagagcgtttgatttcaatcgctatcccacgtgttcgcgacttccgtggtttgaatcctaaatcattcgacggacgtggtaactacagcatgggcgtgcgtgagcaaatcattttccctgaaatcgatttcgataaagtggataaggttcgcggtatggatatcactatcactaccagtgcgaatacaaatgaagaagcacgtgctctgctggacgcgtttaacttcccattcaaaaagtaggggtgtagggttatggcaaaagaatcaatgaaggcacgtgaagctaagcgtactaagctagtagctaagtatgctgaaaagcgcgccgcacttaaagcgattatcagcgatgttaacgcttctgaagatgagcgttgggacgctgttctgaagctacaacaactgccacgtgactctagtaagtctcgtcaacgtaaccgttgtcgtgttactggtcgtccacatggttacctacgcaaattcggtcttagccgtattaagcttcgcgaagcagcgatgcgcggtgaagtccctggccttaagaaagccagctggtaaggagtagctgataatgagcatgcaagatcctatcgcggatatgtttacccgcatccgtaacggccagatggcacagaaagtttctgtaactatgccttcttcaaaacttcgcgttgcaatctgtgaagtattgaaagctgaaggttatattactgacttcgctgcttctggtgacgttaagcctgttttagaagttacgcttaagtacttcgaaggcaagcaagtaattgacactatcgaacgtgtaagccgtcctggtctgcgcatctataagaaaaaagatgagcttccaaaggttatgggtggtttaggcgtagctatcgtgtcgacttctaaaggtgtgatgactgaccgtgcagcgcgtaacgctggcatgggcggtgagatcatcggttatgtagcataacggaggagttgaaatgtcacgtatagcaaaagccccagtagacgttgtatcaggtgtagaagtttctatctctggtcaagaagttactgttaaaggtagtaaaggcactttgacccgcgttttcaacgacgctgtagaagttgcacaggaagagaaccaacttaaagcacttccacgtgaaggctttgttgacggttgggcacaggctggtactgcgcgctctatccttaacgcaatggttcaaggtgtttcagaaggttttgagaaaaaacttcagttgttaggtgttggttaccgtgcacaagcacaaggtaacaaactaaaccttacactaggtttctctcaccctgtagcatacgaaatgcctgaaggcattacggttgaaactcctagccaaactgaaatcgtcgttaaaggcgccgataagcaggtggttggtcaggttgcggcgaacattcgtggttaccgtccaccagagccttacaaaggtaaaggtgtacgttacgctgacgaacacgtacgtcgtaaagaagctaagaaaaagtaggtgggtgatacgatggataagaaaacagctcgcattcgtcgcgctactcgcgcacgagcaaaaattcgtgaactggccgcgcatcgcttggtagttaaccgtacacctcgccacatctacgctcagctaatcgctccatgcggttctgaagtgttggcagcggcttcaactgttgagaaagatcttgcaaaagatcttaagtctacaggtaacgctgaagcagcgacggtagtcggtaaagcaatcgcagagcgcgcgcttgagaaaggcattaaaacagtggctttcgatcgcagtggtttccaataccacggtcgcgttaaagcattagctgatgcagctcgcgaagctggtcttcagttctaggagtttataatggctaaacaagacgttcaaaatggtgaatttctagagaaattgatcgccgtaaaccgcgtatctaaagtggttaaaggtggtcgtatctttagtttcactgcattgacagtagtgggtgacggtaacggtcgcgttggttttggttacggtaaggcacgtgaagtacctgctgcaatccaaaaagcaatggaaaaggcacgtcgcaacatggttgacgtagaccttaacggtcacacgttacagcacccgattaaaggtcgtcactctggctctaaagtttacatgcagccagcatctgaaggtactggtattattgccggtggtgcgatgcgtgcagtacttgaagtagctggtgtacaaaacgtactttcaaaatgttacggctctacaaacccaatcaacgttgtacgtgcaacaatcaacgcgctgacagaaatgaacagcccggcgaaagttgctgcgaagcgtggattgtctgtagaagaaattttggggtaatcagacatggcaacgattaaagtaaagcaaactaaaagtgcaattggccgtctgccaaagcacaaagctacgcttaaaggtttaggccttcgtaaaatcaaccatgttcgtgaactggaagataccccagccgttcgtggcatgatcaaccgtgtatattacatggttgagatagtggaggagtaagacatgcgtttaaatacaatttctccagccgaaggttcaaagcctactggtaagcgttctggtcgtggtatcggctcaggtcttggtaaaacaggtggcgtaggccacaaaggtcaaaaaagccgttcaggtggccgcgttaagccaggattcgaaggtggtcagatgcctatccagcgtcgtcttcctaagttcggtttcacttcacgcaagagctttgttactgatcaagtaactcttgctgaaatcgcgaaggttgatggtgatactgcgtctcttgagactttaaaagcagctggtatcgttaagaaagaaatccagttcgttaaagttgttaagagcggtgaagtatcacgcgctgttacagtaagcgggttaaaggttactaaaggcgctaaagaagcgattgaagctgctggcggtaaagtagaggaataagctagatgacttaattaacggcactcctcagccaagtcaaaagcctccggtcggaggcttttgactacatgcccatggcgtttacgccccgccctgccactcatcgcagtactgttgtaattcattaagcattctgccgacatggaagccatcacaaacggcatgatgaacctgaatcgccagcggcatcagcaccttgtcgccttgcgtataatatttgcccatagtgaaaacgggggcgaagaagttgtccatattggccacgtttaaatcaaaactggtgaaactcacccagggattggctgagacgaaaaacatattctcaataaaccctttagggaaataggccaggttttcaccgtaacacgccacatcttgcgaatatatgtgtagaaactgccggaaatcgtcgtggtattcactccagagcgatgaaaacgtttcagtttgctcatggaaaacggtgtaacaagggtgaacactatcccatatcaccagctcaccgtctttcattgccatacggaactccggatgagcattcatcaggcgggcaagaatgtgaataaaggccggataaaacttgtgcttatttttctttacggtctttaaaaaggccgtaatatccagctgaacggtctggttataggtacattgagcaactgactgaaatgcctcaaaatgttctttacgatgccattgggatatatcaacggtggtatatccagtgatttttttctccattttagcttccttagctcctgaaaatctcgataactcaaaaaatacgcccggtagtgatcttatttcattatggtgaaagttggaacctcttacgtgccaagccaaataggccgt

SEQ ID NO: 259 - DNA, 7024 bp, Artificial
  Synthetic
tcagatccttccgtatttagccagtatgttctctagtgtggttcgttgtttttgcgtgagccatgagaacgaaccattgagatcatgcttactttgcatgtcactcaaaaattttgcctcaaaactggtgagctgaatttttgcagttaaagcatcgtgtagtgtttttcttagtccgttacgtaggtaggaatctgatgtaatggttgttggtattttgtcaccattcatttttatctggttgttctcaagttcggttacgagatccatttgtctatctagttcaacttggaaaatcaacgtatcagtcgggcggcctcgcttatcaaccaccaatttcatattgctgtaagtgtttaaatctttacttattggtttcaaaacccattggttaagccttttaaactcatggtagttattttcaagcattaacatgaacttaaattcatcaaggctaatctctatatttgccttgtgagttttcttttgtgttagttcttttaataaccactcataaatcctcatagagtatttgttttcaaaagacttaacatgttccagattatattttatgaatttttttaactggaaaagataaggcaatatctcttcactaaaaactaattctaatttttcgcttgagaacttggcatagtttgtccactggaaaatcttaaagcctttaaccaaaggattcctgatttccacagttctcgtcatcagctctctggttgctttagctaatacaccataagcattttccctactgatgttcatcatctgagcgtattggttataagtgaacgataccgtccgttctttccttgtagggttttcaatcgtggggttgagtagtgccacacagcataaaattagcttggtttcatgctccgttaagtcatagcgactaatcgctagttcatttgctttgaaaacaactaattcagacatacatctcaattggtctaggtgattttaatcactataccaattgagatgggctagtcaatgataattactagtccttttcctttgagttgtgggtatctgtaaattctgctagacctttgctggaaaacttgtaaattctgctagaccctctgtaaattccgctagacctttgtgtgttttttttgtttatattcaagtggttataatttatagaataaagaaagaataaaaaaagataaaaagaatagatcccagccctgtgtataactcactactttagtcagttccgcagtattacaaaaggatgtcgcaaacgctgtttgctcctctacaaaacagaccttaaaaccctaaaggcttaagtagcaccctcgcaagctcgggcaaatcgctgaatattccttttgtctccgaccatcaggcacctgagtcgctgtctttttcgtgacattcagttcgctgcgctcacggctctggcagtgaatgggggtaaatggcactacaggcgccttttatggattcatgcaaggaaactacccataatacaagaaaagcccgtcacgggcttctcagggcgttttatggcgggtctgctatgtggtgctatctgactttttgctgttcagcagttcctgccctctgattttccagtctgaccacttcggattatcccgtgacaggtcattcagactggctaatgcacccagtaaggcagcggtatcatcaacaggcttacccgtcttactgtcaagaggacatccggtcaaataaaacgaaaggctcagtcgaaagactgggcctttcgttttgctgaggagacttagggaccctttatgacaacttgacggctacatcattcactttttcttcacaaccggcacggaactcgctcgggctggccccggtgcattttttaaatacccgcgagaaatagagttgatcgtcaaaaccaacattgcgaccgacggtggcgataggcatccgggtggtgctcaaaagcagcttcgcctggctgatacgttggtcctcgcgccagcttaagacgctaatccctaactgctggcggaaaagatgtgacagacgcgacggcgacaagcaaacatgctgtgcgacgctggcgatatcaaaattgctgtctgccaggtgatcgctgatgtactgacaagcctcgcgtacccgattatccatcggtggatggagcgactcgttaatcgcttccatgcgccgcagtaacaattgctcaagcagatttatcgccagcagctccgaatagcgcccttccccttgcccggcgttaatgatttgcccaaacaggtcgctgaaatgcggctggtgcgcttcatccgggcgaaagaaccccgtattggcaaatattgacggccagttaagccattcatgccagtaggcgcgcggacgaaagtaaacccactggtgataccattcgcgagcctccggatgacgaccgtagtgatgaatctctcctggcgggaacagcaaaatatcacccggtcggcaaacaaattctcgtccctgatttttcaccaccccctgaccgcgaatggtgagattgagaatataacctttcattcccagcggtcggtcgataaaaaaatcgagataaccgttggcctcaatcggcgttaaacccgccaccagatgggcattaaacgagtatcccggcagcaggggatcattttgcgcttcagccatacttttcatactcccaccattcagagaagaaaccaattgtccatattgcatcagacattgccgtcactgcgtcttttactggctcttctcgctaacccaaccggtaaccccgcttattaaaagcattctgtaacaaagcgggaccaaagccatgacaaaaacgcgtaacaaaagtgtctataatcacggcagaaaagtccacattgattatttgcacggcgtcacactttgctatgccatagcatttttatccataagattagcggatcctacctgacgctttttatcgcaactctctactgtttctccatacccgttttacctgcaggtgcagtatagaaaggggaaagatgtaatgaaagttcgtgcatcagtaaaaaagatttgccgtaactgtaaagttatcaagcgcaacggtgttgtgcgtgtaatttgcagttctgacccaaagcataagcagcgtcagggctaatctaagcggaacaagatattcgcaaagctaagtaagcagaacctagatagtacttgtctggttctgctagttttgttttaaagtattttgaaccttaatttgcaatttagtcgacgggtaagtatcctatcgggctttttaggtcgtcgacaaataaacaagaggagtgctgttaatggcccgtatcgctggcattaacattcctgagcacaagcatgctgtaatcgctatccaagcgatctatggcgttggtcccacacgtgcgaaaagcatttgtgcgggtgctggtgttgcagaaaatacaaaaatcaaagagctagacgaagctactattgataagcttcgtgacgaagtggctaaattcaccgttgaaggtgacctacgccgtgaagtctctatgagcatcaaacgtttgatggacctgggttgcttccgtggtattcgccaccgtcgtagcttgcctctacgtggtcagcgcactaaaactaatgcgcgtacccgtaaaggtcctcgtaagccaattaagaagtaaacggggagtaagttatggctaaagcaccagctcgtagcacgcgtaagcgcgctaaacgtcaggttgcagacggtatggctcatatccatgcgtctttcaacaacacaattgtgactattacagaccgttcaggcaatgcactagcatgggcgacatctggtggttcaggtttccgtggttcacgtaaatctaccccatttgctgcacaggtagctgctgagcgtgcaggtgttgctgcacaagaatacggtcttaagaaccttgaagttttcgttaaaggtccaggtccaggccgtgagtctgcgatccgtgctcttaacgctacaggttataagatcacaaacattaccgatgtgacccctattcctcacaacggttgtcgtccaccgaaaaaacgtcgcgtttaatcgacggacagttggagaaagatcatggcaagatatttgggtccaaaactcaaacttagccgtcgcgaaggaacagacctgttcctaaaaagcggcgttcgcgcaatcgattctaaatgtaaaatcgatacagcgcctggtcagcacggtgcccgtcgtggccgtctgtctgactacggtgttcagctgcgtgaaaaacaaaaagttcgtcgtatgtacggcgtactggaaaagcaattccgcaactactataaagaagctgcacgtctaaaaggcaacacaggtgaaaacttgctacagcttttagaacagcgtcttgataacgtagtttaccgtatgggtttcgctagcactcgtgcagaagcacgtcagctagttagccacaaggcgatcatggtaaatggtcaagttgtgaacatcccatcgtttaacgtttctgccgaagacgtggtttctgttcgtgaaaaggctaagaagcaagcgcgtatcgttgctgctttggaactggctgaccaacgtgagaagccaacctggattgaagtagacagcagcaaaatggaaggcactttcaagcgcgttcctgaaagaactgacctgtctgcggaaattaacgaacagttgatcgtcgaactttactctaagtaaagctaactaaagaggaagcattgtgggttctgtgactgaattcctaaaaccgagattagttgagatcgaaaacgtttctcctactcgtgccaaagtaactttggaaccactagagcgcggctttggccatactctaggtaacgccctacgtcgtattttactgtcatctatgccaggatgcgcagttaccgaggtagaaattgacggcgttcttcacgagtacagcaccaaagaaggtgttcaggaagacgtaattgaaatcttgctaaatcttaaaggtttagcggttcgccttgaaggtaaaactgaggcaaccctaactctagtgaaatctggcgctggccctgttgttgctggtgatattcagcatgatggcgacgtagaaattacaaaccctgaccacgttatttgtactttaactgacgaagctgaaatcagcatgcgcattaaagtagaaatgggtcgcggttatgtaccagcttctacccgtcgctcctctgaagaagatgatcgtccaattggtcgtttgttagtagacgcttcatacagcccagttgaacgtattgcttacagtgtagagtctgctcgtgttgaacaacgcacagacctagacaaactaatcatcgacatggagacgaacggtactttggatcctgaagaagcgatccgccgttctgctactatcctagctgaacagctagatgcattcgtagacctacgtgatgtgtctgagccagaagcgaaagaagagaagccagaattcgatccgattctgcttcgtccagtagatgacctagagctaacagtacgttctgcaaactgtttgaaagcagaagctatccagtacattggtgacctggtacagcgcactgaggttgagctacttaaaacgccaaaccttggtaagaaatcgctaactgaaatcaaagatgttctagcatctcgtggtctttctctaggtatgcgcctagaaaactggccgccagagagcatcgctgaaaaagattaatcaggtttttatcaaactgatttgtagagaaggataaaactatgcgccatcgtaagagtggtcgtcagttgaatcgcaacagcagccatcgtcaagctatgttcaaaaacatggccggttctttggtcaagcacgaagtgatcaaaactacgttaccaaaagcgaaagaattacgtcgcgtaatcgagcctctaatcactatggctaaagaagacagcgttgcaaaccgccgtctagcttttgcccgcactggtgacaaagaggttgtaggtaaactattcaacgagcttggtcctcgttacgaagctcgtccaggcggctacactcgcattcttaaatgcggtttccgtgctggcgacaatgccccaatggcatatgttgagctagttgaccgtccagttgtagaagctgaagaagaagcagtagaagcaactgaagagtaattaatactacttaattaacggcactcctcagccaagtcaaaagcctccggtcggaggcttttgactacatgcccatggcgtttacgccccgccctgccactcatcgcagtactgttgtaattcattaagcattctgccgacatggaagccatcacaaacggcatgatgaacctgaatcgccagcggcatcagcaccttgtcgccttgcgtataatatttgcccatagtgaaaacgggggcgaagaagttgtccatattggccacgtttaaatcaaaactggtgaaactcacccagggattggctgagacgaaaaacatattctcaataaaccctttagggaaataggccaggttttcaccgtaacacgccacatcttgcgaatatatgtgtagaaactgccggaaatcgtcgtggtattcactccagagcgatgaaaacgtttcagtttgctcatggaaaacggtgtaacaagggtgaacactatcccatatcaccagctcaccgtctttcattgccatacggaactccggatgagcattcatcaggcgggcaagaatgtgaataaaggccggataaaacttgtgcttatttttctttacggtctttaaaaaggccgtaatatccagctgaacggtctggttataggtacattgagcaactgactgaaatgcctcaaaatgttctttacgatgccattgggatatatcaacggtggtatatccagtgatttttttctccattttagcttccttagctcctgaaaatctcgataactcaaaaaatacgcccggtagtgatcttatttcattatggtgaaagttggaacctcttacgtgccaagccaaataggccgt

SEQ ID NO: 260 - DNA, 8170 bp, Artificial
  Synthetic
tcagatccttccgtatttagccagtatgttctctagtgtggttcgttgtttttgcgtgagccatgagaacgaaccattgagatcatgcttactttgcatgtcactcaaaaattttgcctcaaaactggtgagctgaatttttgcagttaaagcatcgtgtagtgtttttcttagtccgttacgtaggtaggaatctgatgtaatggttgttggtattttgtcaccattcatttttatctggttgttctcaagttcggttacgagatccatttgtctatctagttcaacttggaaaatcaacgtatcagtcgggcggcctcgcttatcaaccaccaatttcatattgctgtaagtgtttaaatctttacttattggtttcaaaacccattggttaagccttttaaactcatggtagttattttcaagcattaacatgaacttaaattcatcaaggctaatctctatatttgccttgtgagttttcttttgtgttagttcttttaataaccactcataaatcctcatagagtatttgttttcaaaagacttaacatgttccagattatattttatgaatttttttaactggaaaagataaggcaatatctcttcactaaaaactaattctaatttttcgcttgagaacttggcatagtttgtccactggaaaatcttaaagcctttaaccaaaggattcctgatttccacagttctcgtcatcagctctctggttgctttagctaatacaccataagcattttccctactgatgttcatcatctgagcgtattggttataagtgaacgataccgtccgttctttccttgtagggttttcaatcgtggggttgagtagtgccacacagcataaaattagcttggtttcatgctccgttaagtcatagcgactaatcgctagttcatttgctttgaaaacaactaattcagacatacatctcaattggtctaggtgattttaatcactataccaattgagatgggctagtcaatgataattactagtccttttcctttgagttgtgggtatctgtaaattctgctagacctttgctggaaaacttgtaaattctgctagaccctctgtaaattccgctagacctttgtgtgttttttttgtttatattcaagtggttataatttatagaataaagaaagaataaaaaaagataaaaagaatagatcccagccctgtgtataactcactactttagtcagttccgcagtattacaaaaggatgtcgcaaacgctgtttgctcctctacaaaacagaccttaaaaccctaaaggcttaagtagcaccctcgcaagctcgggcaaatcgctgaatattccttttgtctccgaccatcaggcacctgagtcgctgtctttttcgtgacattcagttcgctgcgctcacggctctggcagtgaatgggggtaaatggcactacaggcgccttttatggattcatgcaaggaaactacccataatacaagaaaagcccgtcacgggcttctcagggcgttttatggcgggtctgctatgtggtgctatctgactttttgctgttcagcagttcctgccctctgattttccagtctgaccacttcggattatcccgtgacaggtcattcagactggctaatgcacccagtaaggcagcggtatcatcaacaggcttacccgtcttactgtcaagaggacatccggtcaaataaaacgaaaggctcagtcgaaagactgggcctttcgttttgctgaggagacttagggaccctttatgacaacttgacggctacatcattcactttttcttcacaaccggcacggaactcgctcgggctggccccggtgcattttttaaatacccgcgagaaatagagttgatcgtcaaaaccaacattgcgaccgacggtggcgataggcatccgggtggtgctcaaaagcagcttcgcctggctgatacgttggtcctcgcgccagcttaagacgctaatccctaactgctggcggaaaagatgtgacagacgcgacggcgacaagcaaacatgctgtgcgacgctggcgatatcaaaattgctgtctgccaggtgatcgctgatgtactgacaagcctcgcgtacccgattatccatcggtggatggagcgactcgttaatcgcttccatgcgccgcagtaacaattgctcaagcagatttatcgccagcagctccgaatagcgcccttccccttgcccggcgttaatgatttgcccaaacaggtcgctgaaatgcggctggtgcgcttcatccgggcgaaagaaccccgtattggcaaatattgacggccagttaagccattcatgccagtaggcgcgcggacgaaagtaaacccactggtgataccattcgcgagcctccggatgacgaccgtagtgatgaatctctcctggcgggaacagcaaaatatcacccggtcggcaaacaaattctcgtccctgatttttcaccaccccctgaccgcgaatggtgagattgagaatataacctttcattcccagcggtcggtcgataaaaaaatcgagataaccgttggcctcaatcggcgttaaacccgccaccagatgggcattaaacgagtatcccggcagcaggggatcattttgcgcttcagccatacttttcatactcccaccattcagagaagaaaccaattgtccatattgcatcagacattgccgtcactgcgtcttttactggctcttctcgctaacccaaccggtaaccccgcttattaaaagcattctgtaacaaagcgggaccaaagccatgacaaaaacgcgtaacaaaagtgtctataatcacggcagaaaagtccacattgattatttgcacggcgtcacactttgctatgccatagcatttttatccataagattagcggatcctacctgacgctttttatcgcaactctctactgtttctccatacccgttttacctgcaggtgcagtttttaatcaggagctagttaatggcaacagttaaccagttagtgcgcaagccgcgtagaaagcccgttgaaaaaagcaacgtagctgctctacaagcttgtccacaaagacgtggtgtatgtactcgtgtatatactactacgcctaagaaaccaaactctgcactacgtaaagtatgtcgtgtacgtctaactaacggttttgaagtttcttcatacatcggtggtgaaggtcacaacctacaagagcacagtgtagtacttatccgtggtggtcgtgttaaagatctaccaggtgttcgttatcacacagttcgcggtactcttgactgcgcaggtgtaaacgatcgtaaacaagcccgttctaagtacggcgcgaagaagcctaagtcataacggttctccgttagtaaggccaaactgaagtttaagagttttgggttttccctgaattcatacggagaatagaaaatgccaagaagaagagtcgtaggtcaacgtaaaatcctaccagagccaaaatttggttcacaactgcttgcgaaattcatgaatgtcgtaatgctcgacggcaaaaagtcagtcgctgaaaaaatcgtttacggtgcgcttgatattgttgctgaaaaaaccggcaaagcacacctagatatcttcgaggaagcgcttgataacatccgcccaacagtagaggttaagtctcgtcgtgttggtggttcaacttatcaggttccagttgaagtacgtccagttcgtcgtaacgcgctaggtatgcgttggatggttgaagctgcacgtaaacgtggcgaaaagtctatggcacaacgcctagcggctgaaatgctagacgcagcagataataaaggttcagcggttaagaaacgtgaagacgttcaccgtatggccgaagcaaacaaagcgtttgctcactaccgttggtaatcaacgttatttaactgagagagatttatgcctcgtaagacctcgattgagcgttatcgcaatattggtattgtggctcacgtggacgcgggtaaaaccacgaccacagagcgtgttctgttttatacaggactgtctcacaaaatcggtgaagtgcacgatggtgctgctaccatggactggatggagcaagagcaggagcgtggtattactatcacgtctgctgcaacgacttgtttctggtctggtatggagcaacagttcgatcaacacaggatcaacatcatcgacacccctggacacgttgactttactatcgaagtagagcgttcattgcgtgtactagacggtgcagttgttgttttctgtgggtcttctggggtagaacctcaatcagagacagtctggcgacaggctgacaaatatcaagtgccacgccttgtgttcgttaataagatggaccgggctggcgctgattttgaacgcgttgtgggtcaaatccgcaagcgtttaggcgcaaactgtgttccgattcaaatcaacatgggcgctgaagagaatttccatggcgtcatcgaccttgtgaagatgaaagccatcaactggaatgaagaagacatgggtatgacatttacctatgaagacattccggctgaatatttagataccgctgagcagtaccgcacagaaatgatcgaagcggctgcagaagcatctgatgagctaatgaataaatacttggaaggtgaagagctttctgaggaagaaattcgttcaggccttcgtcagcgtacgctgaacaacgaaattgttcttgccacctgtggcagtgccttcaaaaacaaaggtgttcaggcagtactagactctgttattcattatcttccgtctccaacagaagttaaggccatcactggtgtacttgacgacaaagacgagacagaagcagagcgtcattcaagcgacgatgagccgttctcagcgctagcatttaaaatagcgaccgacccatttgtgggtacgctaaccttcttccgttgttactctggtgtagtaaacacgggtgatacggtttacaaccctgttaagggcaagcgtgagcgctttggtcgtattgtgcaaatgcacgcgaaagaccgtgaagaaattaaagaagtacgcgcaggtgacatcgctgcggccattggccttaaagatgtaacaaccggtgatacgctttgtgaccctaaccatgttattacgctagagcgtatggagttcccagagccggtaatttcaattgcggttgagcctaagtcgcaagctgaccaagagaaaatgggcatagccctaagcaagcttgcagctgaagatccgtcattcaaagtgaaaactgacgacgagacaggccagacgattatctcaggtatgggtgaacttcaccttgatatcattgtcgaccgcatgaagcgcgaatttaaagttgaatgtaacgtaggtaaccctcaggttgcttatcgtgaaacccttcgtaaatctgttgaagttgaagggaagttcgttcgtcagtcaggcggccgcggccaatttggtcatgtatggctgcgcattgagcctcaagaagaaggttcaggctacgaatttgtgaacgaaatcgtcggtggtgtggtaccaaaagagttcattccagcggtcgataaaggaattcaggagcagatgcgaagtggtgttcttgcagggtatccagtacttgatgtaaaggttacgttgtttgacggttcataccacgatgttgactcttctgaaatggcgtttaagatcgccggctctatgggtttcaaaaaaggcgccgcagaagcaaatccggtgttacttgaacccacaatgaaagttgaagtgactactccagaagactggatgggtgatgtagttggtgacattaatcgtcgccgcggcatgatcgaaggtatggaagatggcgtcgcaggtgttaaaataatacgtgctaaagtgccgctttcagaaatgtttggctacgcaactgacttgcgttcacaaacacaaggtcgtgcttcatactcaatggagttcttcaattattctgaggcgccgaacaatgtggcgcaggctattattgaatctagaatttaatctaaatgaaggttcggtccggtctattggtgggtcggacttttaacttaggaaacgagaaaaatggcaaaagaaaagtttgaacgtacgaaaccccacgtaaacgtgggtacaatcggccacgttgaccacggtaaaactacgctaactgcagcaatcactacagttctttcaaagacttacggtggtaacgcacaggctttcgatcaaatcgataacgcgcctgaagaaaaagcacgtggtatcaccatctctacttcacacgtagaatacgatactcctactcgtcactacgcacacgtagactgcccaggacacgctgattacgttaaaaacatgatcactggtgctgctcagatggacggtggtatcctagtagttgctgcgactgatggccctatgccacagactcgtgagcacatcctacttggtcgtcaggttggtattccttacatcatcgtattcatgaacaagtgtgacatggttgacgatgaagagcttctagagctagtagaaatggaagttcgtgaacttctaaacgaatacgaattcccaggtgatgacctaccagttatccaaggttcagctcttaaagcgcttgaaggcgacgcagagtgggaaaagaaaatcatcgagcttggtgaagcgcttgattcatatatcccagagccagagcgtgcaatcgacaagccgttcattcttccaatcgaagacgtattctcaatctcaggccgtggtacagttgtaacaggtcgtgttgagcaaggtatcatcaaggttggtgaagaagtagaaatcgtaggtatcaaagacactactaagactacttgtactggtgttgagatgttccgtaagcttcttgacgaaggccgtgcaggtgagaacgttggtgttcttctacgtggtactaagcgtgatgaagttgaacgtggtcaagtactagctaagcctggttcaatcactccacacgttaacttcgaagcagaagtatacgtactatctaaagatgaaggtggccgtcatactccattcttcaaaggctaccgtccacagttctacttccgtacaactgacgtaactggtgctgtagagcttccagaaggcgtagaaatggtaatgcctggtgacaaccttaaattcaaagttgagctaattgctccgattgcgatggaagaaggtcttcgtttcgcaatccgtgaaggtggtcgtacagtaggtgctggtgttgtatctaagatcctagactaatctagactacttaattaacggcactcctcagccaagtcaaaagcctccggtcggaggcttttgactacatgcccatggcgtttacgccccgccctgccactcatcgcagtactgttgtaattcattaagcattctgccgacatggaagccatcacaaacggcatgatgaacctgaatcgccagcggcatcagcaccttgtcgccttgcgtataatatttgcccatagtgaaaacgggggcgaagaagttgtccatattggccacgtttaaatcaaaactggtgaaactcacccagggattggctgagacgaaaaacatattctcaataaaccctttagggaaataggccaggttttcaccgtaacacgccacatcttgcgaatatatgtgtagaaactgccggaaatcgtcgtggtattcactccagagcgatgaaaacgtttcagtttgctcatggaaaacggtgtaacaagggtgaacactatcccatatcaccagctcaccgtctttcattgccatacggaactccggatgagcattcatcaggcgggcaagaatgtgaataaaggccggataaaacttgtgcttatttttctttacggtctttaaaaaggccgtaatatccagctgaacggtctggttataggtacattgagcaactgactgaaatgcctcaaaatgttctttacgatgccattgggatatatcaacggtggtatatccagtgatttttttctccattttagcttccttagctcctgaaaatctcgataactcaaaaaatacgcccggtagtgatcttatttcattatggtgaaagttggaacctcttacgtgccaagccaaataggccgt

SEQ ID NO: 261 - DNA, 6260 bp, Artificial
  Synthetic
tcagatccttccgtatttagccagtatgttctctagtgtggttcgttgtttttgcgtgagccatgagaacgaaccattgagatcatgcttactttgcatgtcactcaaaaattttgcctcaaaactggtgagctgaatttttgcagttaaagcatcgtgtagtgtttttcttagtccgttacgtaggtaggaatctgatgtaatggttgttggtattttgtcaccattcatttttatctggttgttctcaagttcggttacgagatccatttgtctatctagttcaacttggaaaatcaacgtatcagtcgggcggcctcgcttatcaaccaccaatttcatattgctgtaagtgtttaaatctttacttattggtttcaaaacccattggttaagccttttaaactcatggtagttattttcaagcattaacatgaacttaaattcatcaaggctaatctctatatttgccttgtgagttttcttttgtgttagttcttttaataaccactcataaatcctcatagagtatttgttttcaaaagacttaacatgttccagattatattttatgaatttttttaactggaaaagataaggcaatatctcttcactaaaaactaattctaatttttcgcttgagaacttggcatagtttgtccactggaaaatcttaaagcctttaaccaaaggattcctgatttccacagttctcgtcatcagctctctggttgctttagctaatacaccataagcattttccctactgatgttcatcatctgagcgtattggttataagtgaacgataccgtccgttctttccttgtagggttttcaatcgtggggttgagtagtgccacacagcataaaattagcttggtttcatgctccgttaagtcatagcgactaatcgctagttcatttgctttgaaaacaactaattcagacatacatctcaattggtctaggtgattttaatcactataccaattgagatgggctagtcaatgataattactagtccttttcctttgagttgtgggtatctgtaaattctgctagacctttgctggaaaacttgtaaattctgctagaccctctgtaaattccgctagacctttgtgtgttttttttgtttatattcaagtggttataatttatagaataaagaaagaataaaaaaagataaaaagaatagatcccagccctgtgtataactcactactttagtcagttccgcagtattacaaaaggatgtcgcaaacgctgtttgctcctctacaaaacagaccttaaaaccctaaaggcttaagtagcaccctcgcaagctcgggcaaatcgctgaatattccttttgtctccgaccatcaggcacctgagtcgctgtctttttcgtgacattcagttcgctgcgctcacggctctggcagtgaatgggggtaaatggcactacaggcgccttttatggattcatgcaaggaaactacccataatacaagaaaagcccgtcacgggcttctcagggcgttttatggcgggtctgctatgtggtgctatctgactttttgctgttcagcagttcctgccctctgattttccagtctgaccacttcggattatcccgtgacaggtcattcagactggctaatgcacccagtaaggcagcggtatcatcaacaggcttacccgtcttactgtcaagaggacatccggtcaaataaaacgaaaggctcagtcgaaagactgggcctttcgttttgctgaggagacttagggaccctttatgacaacttgacggctacatcattcactttttcttcacaaccggcacggaactcgctcgggctggccccggtgcattttttaaatacccgcgagaaatagagttgatcgtcaaaaccaacattgcgaccgacggtggcgataggcatccgggtggtgctcaaaagcagcttcgcctggctgatacgttggtcctcgcgccagcttaagacgctaatccctaactgctggcggaaaagatgtgacagacgcgacggcgacaagcaaacatgctgtgcgacgctggcgatatcaaaattgctgtctgccaggtgatcgctgatgtactgacaagcctcgcgtacccgattatccatcggtggatggagcgactcgttaatcgcttccatgcgccgcagtaacaattgctcaagcagatttatcgccagcagctccgaatagcgcccttccccttgcccggcgttaatgatttgcccaaacaggtcgctgaaatgcggctggtgcgcttcatccgggcgaaagaaccccgtattggcaaatattgacggccagttaagccattcatgccagtaggcgcgcggacgaaagtaaacccactggtgataccattcgcgagcctccggatgacgaccgtagtgatgaatctctcctggcgggaacagcaaaatatcacccggtcggcaaacaaattctcgtccctgatttttcaccaccccctgaccgcgaatggtgagattgagaatataacctttcattcccagcggtcggtcgataaaaaaatcgagataaccgttggcctcaatcggcgttaaacccgccaccagatgggcattaaacgagtatcccggcagcaggggatcattttgcgcttcagccatacttttcatactcccaccattcagagaagaaaccaattgtccatattgcatcagacattgccgtcactgcgtcttttactggctcttctcgctaacccaaccggtaaccccgcttattaaaagcattctgtaacaaagcgggaccaaagccatgacaaaaacgcgtaacaaaagtgtctataatcacggcagaaaagtccacattgattatttgcacggcgtcacactttgctatgccatagcatttttatccataagattagcggatcctacctgacgctttttatcgcaactctctactgtttctccatacccgttttacctgcaggtgcagtcaaacaagagagcatgtaaaatggctaaaaaagtaagcggtattatcaagcttcaggttgcagcaggcgctgctaacccaagtccaccagttggtcctgcactaggtcaacacggtgtaaacatcatggaattctgtaaggctttcaacgcgaaaacagaaagccttgagaaaggcgctccagtaccagtagaaattactgtatacgaagatcgctctttcacattcgaaactaagactcctcctgcgtcttacctgcttaagaaagcagcgggcatcaagagtggttctggccgtcctaacactgaaaaagtgggtaaagttactcgcgctcagttggaagagattgctaaaactaaagagccagaccttactgcagctgatctagatgcagcggtacgcactatcgcgggttctgctcgctcaatgggcttgaacgtagaggactaatcgaatggctaaattaactaaacgcgctcgcgtaatccgcgacaaagttgactctactaaagagtacgaaatcaacgaagcagtagcgcttcttaaagaactagcaacagctaagttcgcagaaagcgtagacgtatctgttaaccttggtatcgatgcgaagaaatctgaccaaaacgttcgtggtgcaactgtactacctaacggtactggtaaagacgttcgcgttgcagtattcactcaaggtgcaaatgctgaagcagctaaagaagctggtgcagacatcgttggtatggacgacttagctgagcaagttaagaaaggcgaaatgaactttgacgtagtagttgctagcccagacgcgatgcgtgttgttggtcaactaggtcaaatcttaggtccacgcggccttatgcctaacccaaaaactggcactgtaacgcctgacgttgcaacggcagttaagaacgctaaagctggtcaggtacgctaccgtaacgataagaacggtatcatccacgctagcatcggtaagattgcgttcgaagcgaaccaaattcaagaaaaccttgaagcgctacttgaagcattgaagaaagctaagccttcttctgcgaaaggtacatacatcaagaagatcagcctaagcactacaatgggtgctggtgttgctcttgataaggcttctgtaggtctttaatttcgctgagcttaggcttatcgaaatctcttaaaggttatgggttggagctgtgacaattagcagtgctaataagcagctcccgtcctagaccgcaggtgcggtgtggtgaaagaggtaagagaactttcacagtcaacacactgcttaatacaacaacctgcgcagacggtggtttgactcagactctctggggtaacaaacaccgtagagcggtatcaaccatgagggttggtatcaatctgtgaaccctgacggcgtaagcgggtaaccgcaaacaaagtcagatacaaagaggtgaactcagtggcactaggtttagcagcaaaaaaagagatcgtagcagaagtttctgaagttgcgtctcgcgctctatccgtagccgttgctgaataccgtgggatggaagttgcagaactgactgacctacgtgttaaagctcgtgagcaaggcgtatacctaaaggttgtacgtaacacacttgcaaagcgtgctctagcagacagtcaatttgcagacttagacagcgccttaactggtccgcttatctatggtttctctatcgacgcaccaggcggtgcggcacgtcttttcaaagacttcggtaagactaacgataagctaaaagttacagcactatctattggtagcggtcttcttggtccagagaaattggacgcagttgcagcactacctacccgcgacgaagcgcttgcgaaactacttgcaaccttcaaagcaccagttgggaaattcgttcaaacaatcaacgaagttcctggcaagtttgtgcgcgtattggcggcggtcaaagacaccaagtaattggcgtttttggcatattgatttttttaacattttatacccaggagtttagagaacatggctctaactaaagaagatatcttaaacgcaatcgctgaaatgccagtaatggaactggttgaactaatcgaagcggctgaagaaaaattcaacgtatctgctgcagctgctgttgctgttgctggtccagctgctggcggtgacgctgctgctgcagaagaaaagactgaattcgacgttgtaatgacttcattcggtggcaacaaagttgcagttatcaaagcagttcgcggcgcgactggcctaggtcttaaagaagctaaagaagtagttgagtctgctcctaaagctatcaaagaaggcgtaagcaaagatgaagctgaagcacttaagaaagagcttgaagaagctggtgcagaagtagaaatcaagtaatctgacatacttaattaacggcactcctcagccaagtcaaaagcctccggtcggaggcttttgactacatgcccatggcgtttacgccccgccctgccactcatcgcagtactgttgtaattcattaagcattctgccgacatggaagccatcacaaacggcatgatgaacctgaatcgccagcggcatcagcaccttgtcgccttgcgtataatatttgcccatagtgaaaacgggggcgaagaagttgtccatattggccacgtttaaatcaaaactggtgaaactcacccagggattggctgagacgaaaaacatattctcaataaaccctttagggaaataggccaggttttcaccgtaacacgccacatcttgcgaatatatgtgtagaaactgccggaaatcgtcgtggtattcactccagagcgatgaaaacgtttcagtttgctcatggaaaacggtgtaacaagggtgaacactatcccatatcaccagctcaccgtctttcattgccatacggaactccggatgagcattcatcaggcgggcaagaatgtgaataaaggccggataaaacttgtgcttatttttctttacggtctttaaaaaggccgtaatatccagctgaacggtctggttataggtacattgagcaactgactgaaatgcctcaaaatgttctttacgatgccattgggatatatcaacggtggtatatccagtgatttttttctccattttagcttccttagctcctgaaaatctcgataactcaaaaaatacgcccggtagtgatcttatttcattatggtgaaagttggaacctcttacgtgccaagccaaataggccgt

SEQ ID NO: 262 - DNA, 9426 bp, Artificial
  Synthetic
tcagatccttccgtatttagccagtatgttctctagtgtggttcgttgtttttgcgtgagccatgagaacgaaccattgagatcatgcttactttgcatgtcactcaaaaattttgcctcaaaactggtgagctgaatttttgcagttaaagcatcgtgtagtgtttttcttagtccgttacgtaggtaggaatctgatgtaatggttgttggtattttgtcaccattcatttttatctggttgttctcaagttcggttacgagatccatttgtctatctagttcaacttggaaaatcaacgtatcagtcgggcggcctcgcttatcaaccaccaatttcatattgctgtaagtgtttaaatctttacttattggtttcaaaacccattggttaagccttttaaactcatggtagttattttcaagcattaacatgaacttaaattcatcaaggctaatctctatatttgccttgtgagttttcttttgtgttagttcttttaataaccactcataaatcctcatagagtatttgttttcaaaagacttaacatgttccagattatattttatgaatttttttaactggaaaagataaggcaatatctcttcactaaaaactaattctaatttttcgcttgagaacttggcatagtttgtccactggaaaatcttaaagcctttaaccaaaggattcctgatttccacagttctcgtcatcagctctctggttgctttagctaatacaccataagcattttccctactgatgttcatcatctgagcgtattggttataagtgaacgataccgtccgttctttccttgtagggttttcaatcgtggggttgagtagtgccacacagcataaaattagcttggtttcatgctccgttaagtcatagcgactaatcgctagttcatttgctttgaaaacaactaattcagacatacatctcaattggtctaggtgattttaatcactataccaattgagatgggctagtcaatgataattactagtccttttcctttgagttgtgggtatctgtaaattctgctagacctttgctggaaaacttgtaaattctgctagaccctctgtaaattccgctagacctttgtgtgttttttttgtttatattcaagtggttataatttatagaataaagaaagaataaaaaaagataaaaagaatagatcccagccctgtgtataactcactactttagtcagttccgcagtattacaaaaggatgtcgcaaacgctgtttgctcctctacaaaacagaccttaaaaccctaaaggcttaagtagcaccctcgcaagctcgggcaaatcgctgaatattccttttgtctccgaccatcaggcacctgagtcgctgtctttttcgtgacattcagttcgctgcgctcacggctctggcagtgaatgggggtaaatggcactacaggcgccttttatggattcatgcaaggaaactacccataatacaagaaaagcccgtcacgggcttctcagggcgttttatggcgggtctgctatgtggtgctatctgactttttgctgttcagcagttcctgccctctgattttccagtctgaccacttcggattatcccgtgacaggtcattcagactggctaatgcacccagtaaggcagcggtatcatcaacaggcttacccgtcttactgtcaagaggacatctggtcaaataaaacgaaaggctcagtcgaaagactgggcctttcgttttgctgaggagacttagggaccctttatgacaacttgacggctacatcattcactttttcttcacaaccggcacggaactcgctcgggctggccccggtgcattttttaaatacccgcgagaaatagagttgatcgtcaaaaccaacattgcgaccgacggtggcgataggcatccgggtggtgctcaaaagcagcttcgcctggctgatacgttggtcctcgcgccagcttaagacgctaatccctaactgctggcggaaaagatgtgacagacgcgacggcgacaagcaaacatgctgtgcgacgctggcgatatcaaaattgctgtctgccaggtgatcgctgatgtactgacaagcctcgcgtacccgattatccatcggtggatggagcgactcgttaatcgcttccatgcgccgcagtaacaattgctcaagcagatttatcgccagcagctccgaatagcgcccttccccttgcccggcgttaatgatttgcccaaacaggtcgctgaaatgcggctggtgcgcttcatccgggcgaaagaaccccgtattggcaaatattgacggccagttaagccattcatgccagtaggcgcgcggacgaaagtaaacccactggtgataccattcgcgagcctccggatgacgaccgtagtgatgaatctctcctggcgggaacagcaaaatatcacccggtcggcaaacaaattctcgtccctgatttttcaccaccccctgaccgcgaatggtgagattgagaatataacctttcattcccagcggtcggtcgataaaaaaatcgagataaccgttggcctcaatcggcgttaaacccgccaccagatgggcattaaacgagtatcccggcagcaggggatcattttgcgcttcagccatacttttcatactcccaccattcagagaagaaaccaattgtccatattgcatcagacattgccgtcactgcgtcttttactggctcttctcgctaacccaaccggtaaccccgcttattaaaagcattctgtaacaaagcgggaccaaagccatgacaaaaacgcgtaacaaaagtgtctataatcacggcagaaaagtccacattgattatttgcacggcgtcacactttgctatgccatagcatttttatccataagattagcggatcctacctgacgctttttatcgcaactctctactgtttctccatacccgttttacctgcaggtgcagtttaaaagttatttgagacttatgactgaaaattttgcacaactttttgaagaaagcttacaagaactagaaacacgtcctggttcaattgtaaaaggtactgttgtttctatcgacaaagacatcgttcttgttgatgcaggcttgaaatcagaaagtgctatcccagctgaccaattcaaaaacgctgaaggcgaactagaaatcgctatcggtgaccaagtagacgtagcactagatgcagttgaagatggtttcggtgaaactatcctttctcgcgaaaaagcgaagcgtcacgaagcgtgggttgagctggaaaaagcttacgaagataaagctactatcaaaggcgttatcaacggtaaagttaaaggtggtttcactgttgaagttaacagtgtacgcgcgttccttcctggttctcttgttgacgtacgtccagtacgtgacactacgcaccttgaaggcaaagagcttgaatttaaagttatcaagcttgacgctaagcgtaacaacgttgttgtttctcgtcgtgcagttatcgaagcagaaagcagcgcagagcgcgaaacgcttcttgctaaccttgaagaaggtcatgaaatcaagggtatcgttaagaaccttaccgattacggtgcgttcgttgaccttggtggcgtagacggtcttctacacatcactgacatggcttggaagcgcgttaagcacccaagtgaaatcgtgaatgttggtgacgaaatcaacgttaaagtacttaagttcgacaaagagaagcagcgtgtttctcttggcatgaagcaaatgggcaacgatccatggcaagaaattgcttctcgttacccagaaggtactaagatcaacggtcaggttactaaccttactgactacggctgcttcgttgaaatcgaagacggcgttgaaggtcttgtacacgtttctgaaatggattggactaacaagaacatccacccatctaaagttgttaacctaggtgacactgtagatgtaatggttcttgaaattgacgaagagcgtcgtcgtatttctctaggtcttaagcagtgcattgctaacccttgggaaacatttgctgagtcacacgaaaaaggtgacaaagtgtctggtaagatcaagtcaatcactgacttcggtatcttcatcggtcttgacggcggcatcgacggtctagttcacctttctgacatcagctggaacaagtctggtgaagacgcggttcgcgactacaagaaaggcgacgaaatctctgcagttgtacttcaagtcgacccagagcgtgagcgtatctctcttggcgttaagcaaatcgaagaagatcctttcaacaagtatctgacagataacaagaaaggtgctatcgttactggtacagtaacagcagttgatgcgaaaggcgttactgtaaacctagctgaagaagttgacggctacatccgcgttgcagatcttgctgtagagcgtgttgaagacgcaacagaagtagcaagcgttggtgatagcatcgaagcgaagttcatgggcgttgaccgtaagaaccgcactgttaacctatctgttaaagcgaaagatcaggctgacgaaaaagaagctatcgataaagttaaccagcaagaagatgttggtttcgctaacgcgatggcagaagcatttaaagctgctaaaggcgaataatgcttttgattaatattaggagaatgatatgtcactaactaaagcagaaaccgcaaaaatcattgctgagtacggcgttaaagaaggcgacactggttcaccagaagttcaagttgctttgcttactcacaacatcaacaagcttcaaggtcactttgctgatcacaagaaagatcaccactcacgtcgtggtcttctacgtatggttagccaacgtcgtaagcttctagactaccttaaaggcaagaacgcagagcgttaccttgaccttatcaagcgtctaggtctacgtcgataagactaggttttattttgggagttacaccttggctaacattaagtctgctaagaagcgtgcaatccaagccgaaaagcgtcgtcagcacaacgctagccgtcgttcaatgactcgtacaagcatcaagaaagttatcgctgcaattgcaagcggtgacaaagaagcggcacaagctgcacttactgctgctactccagtacttgacagaatggctactaaaggcttgattcacaagaacaaagctgctcgtcataagagccgtctagctgcacaaatcaaagcactaggttaatctttacgacaacgagtttgaggcatttatggttactattcgtttacagcgtggtggcgcgaaaaagcgtccattttatcaactagtggtggctgatagccgtcgtgcaagaaacggtcgtttcattgaaaacatcggtttcttcaacccaactgcacaaggtcaagcggagcgtcttcgcgtagatctagagcgtgttgaatactgggttggtgtaggcgcgagcttatcagatcgcgtttctagcttggtaaaagaagcgaaaaaatctgcagcgtaagctgttattacaaccgtaaggagctataatgcgtcattacgaaatcgtatttatggttcaccctgatcagagtgaacaagtacctggtatgatcgagcgttataccacaatcctaaagcaagacggtggtcagattcatcgtttagaagattggggccgtcgtcaactggcttacccaattgaaaagctgcacaaagcccactacgtactaatcaatgctgaagcgtctgcagaagctgttgatgaattggaaaatgctttccgtttcaacgacgtgatcctacgtaacatggttatgcgcactaagactgctgtgactgagccttctccaatgatgaaagaagagcctcgtcgtgagcgtcgtgacgattctgctcctcgccaagatcgcgcggaaaagaaaactgaaaccactgaagacaacgcttaaggagatcacccatggctcgttttttcagacgtcgtaagttctgccgtttcactgcagaaggtgtgactgagattgattacaaagatatcgctactcttaagaactacatcactgagagcggtaaaattgtccctagccgtattactggtacaagcgcaaaatatcagcgtcagctgtcttctgcgatcaagcgcgcacgtttccttgcgttgcttccgtacactgattcacacaagtaatttggcgaatataagggttagctaagatgaatatcatcctactagataaaatcgccaaccttggcggcctgggcgaccaagtgactgttaagtctggttacgctcgtaacttccttttcccacagggtaaagcggttcctgcaactaaagacaacgttgaaaagttcgaagcacgtcgtgctgaacttgaagcgaaaattgctgagcaactagctgctgctaacgcacgcgctgaaaaagttgctgagcttgctgaagttacaatcgcagctcctgctggtgacgaaggtaaactttttggctctgttggtactcgtgacatcgctgatgcaatcactgcagctggcgttgaagtacaaaaagcagaagttaaactacctactggtactcttcgtgaaactggtgagtatgacatcgacttacaacttcactctgacgttatcacttcaatcaaagtgatcatcattgctgaagcgtaatcggtgacttattcgggtgaatttgaaaatgaaaacttttgttgctaagccagaaacggttcaacgtgactggtatgtggtagacgccacagacaaaactctaggccgtttggcttctgaaatcgcactacgccttcgtggtaagcacaagccagagtacacacctcacgtggacactggtgattacatcgtagtaatcaatgctgagaaagttgcggtaacaggccgtaaagcgcaagacaaaatgtactatgcgcactctggttacccaggtggtcttaaagagacaaactttgaaaaactaattgctcacaagccagaaatggttattgaaaaagcagttaaaggcatgttgccaaaaggccctctaggtcgcgcaatgttccgtaaaatgaaagtttacgcaggtgcagagcacaagcacaccgcacagcaaccacaagttttggacatttaaggagctattaacatggcagatactcaatactacggcacaggccgccgcaaaagttctactgctcgtgtgttcctacgtccaggcacaggtagcattaaagtaaaccaacgcgctcttgacgagtactttggtcgtgaaacagagtgcatggttgttcgtcagccacttgaacttgttgaaatgactgaaaagtttgacgtatacatcactgttaaaggtggtggttctaacggtcaagcgggtgcaatccgtcacggtcttactcgtgctcttatggagtatgatgaggcactacgtccagcacttcgtaaagctggcttcgttactcgtgacgcacgtcgcgttgaacgtaagaaagttggtctacacaaagcgcgtaagcgtccacaattctcaaagcgttaatttttacgagttctgaggtgagtgtttaatgcctatcgttaaagttagagaaaacgagccgtttgatgtggcgctgcgtcgttttaagcgttcttgtgaaaaagcaggtgttctttctgaagttcgtcgtcgtgaattcttcgaaaagccaacttgggaacgcaagcgcaagaaagctgccgctaagaagcgtcatcttaagaagctagctcgtgaaaacgcacgtcgcgtaaaactctactaatatagggtaaccccaagaggaaaataaaatggctaatgtttctatgcgtgacatgctgaaagcaggtgtgcatttcggtcaccaaactcgttactggaacccaaagatgaagcctttcatcttcggcgctcgtaacaaagttcatatcatcaaccttgaaaaaacggttccacttttcaacaacgcacttaactacctttcaggtgttgcgtctaagaaaggtaaaatccttttcgttggtactaagcgcgcagctggcgaagcagttaaagatgctgctcttaagtgcgaccagtactacgtaaacaagcgttggttaggtggtatgctgactaactggaaaacagtacgtcagtcaatcaagcgtcttaaagatcttgagcagcaaagccaagacggtacgtttgagaagctaactaagaaagaagcacttatgcttcagcgcgaaatggacaagcttgaaaacagccttggcggtatcaaagacatgggcggtcttccagacgcgatctttgttatcgacgcagatcacgagcacattgctgtaacagaagctcgtaacctaggtattcctgttgttggtgttgttgatactaactctaacccagacggtgttgattacatcatccctggtaacgacgatgctatccgcgctatccaactttacttggatgctgctgcaaacgctatcaactcaggtcgcgaaagcaaccttgaagtacaagctgagcaagacgacttcgtagaagcagcagagtaattctgattacttaattaacggcactcctcagccaagtcaaaagcctccggtcggaggcttttgactacatgcccatggcgtttacgccccgccctgccactcatcgcagtactgttgtaattcattaagcattctgccgacatggaagccatcacaaacggcatgatgaacctgaatcgccagcggcatcagcaccttgtcgccttgcgtataatatttgcccatagtgaaaacgggggcgaagaagttgtccatattggccacgtttaaatcaaaactggtgaaactcacccagggattggctgagacgaaaaacatattctcaataaaccctttagggaaataggccaggttttcaccgtaacacgccacatcttgcgaatatatgtgtagaaactgccggaaatcgtcgtggtattcactccagagcgatgaaaacgtttcagtttgctcatggaaaacggtgtaacaagggtgaacactatcccatatcaccagctcaccgtctttcattgccatacggaactccggatgagcattcatcaggcgggcaagaatgtgaataaaggccggataaaacttgtgcttatttttctttacggtctttaaaaaggccgtaatatccagctgaacggtctggttataggtacattgagcaactgactgaaatgcctcaaaatgttctttacgatgccattgggatatatcaacggtggtatatccagtgatttttttctccattttagcttccttagctcctgaaaatctcgataactcaaaaaatacgcccggtagtgatcttatttcattatggtgaaagttggaacctcttacgtgccaagccaaataggccgt

SEQ ID NO: 263 - DNA, 7141 bp, Artificial
  Synthetic
tcagatccttccgtatttagccagtatgttctctagtgtggttcgttgtttttgcgtgagccatgagaacgaaccattgagatcatgcttactttgcatgtcactcaaaaattttgcctcaaaactggtgagctgaatttttgcagttaaagcatcgtgtagtgtttttcttagtccgttacgtaggtaggaatctgatgtaatggttgttggtattttgtcaccattcatttttatctggttgttctcaagttcggttacgagatccatttgtctatctagttcaacttggaaaatcaacgtatcagtcgggcggcctcgcttatcaaccaccaatttcatattgctgtaagtgtttaaatctttacttattggtttcaaaacccattggttaagccttttaaactcatggtagttattttcaagcattaacatgaacttaaattcatcaaggctaatctctatatttgccttgtgagttttcttttgtgttagttcttttaataaccactcataaatcctcatagagtatttgttttcaaaagacttaacatgttccagattatattttatgaatttttttaactggaaaagataaggcaatatctcttcactaaaaactaattctaatttttcgcttgagaacttggcatagtttgtccactggaaaatcttaaagcctttaaccaaaggattcctgatttccacagttctcgtcatcagctctctggttgctttagctaatacaccataagcattttccctactgatgttcatcatctgagcgtattggttataagtgaacgataccgtccgttctttccttgtagggttttcaatcgtggggttgagtagtgccacacagcataaaattagcttggtttcatgctccgttaagtcatagcgactaatcgctagttcatttgctttgaaaacaactaattcagacatacatctcaattggtctaggtgattttaatcactataccaattgagatgggctagtcaatgataattactagtccttttcctttgagttgtgggtatctgtaaattctgctagacctttgctggaaaacttgtaaattctgctagaccctccgtaaattccgctagacctttgtgtgttttttttgtttatattcaagtggttataatttatagaataaagaaagaataaaaaaagataaaaagaatagatcccagccctgtgtataactcactactttagtcagttccgcagtattacaaaaggatgtcgcaaacgctgtttgctcctctacaaaacagaccttaaaaccctaaaggcttaagtagcaccctcgcaagctcgggcaaatcgctgaatattccttttgtctccgaccatcaggcacctgagtcgctgtctttttcgtgacattcagttcgctgcgctcacggctctggcagtgaatgggggtaaatggcactacaggcgccttttatggattcatgcaaggaaactacccataatacaagaaaagcccgtcacgggcttctcagggcgttttatggcgggtctgctatgtggtgctatctgactttttgctgttcagcagttcctgccctctgattttccagtctgaccacttcggattatcccgtgacaggtcattcagactggctaatgcacccagtaaggcagcggtatcatcaacaggcttacccgtcttactgtcaagaggacatccggtcaaataaaacgaaaggctcagtcgaaagactgggcctttcgttttgctgaggagacttagggaccctttatgacaacttgacggctacatcattcactttttcttcacaaccggcacggaactcgctcgggctggccccggtgcattttttaaatacccgcgagaaatagagttgatcgtcaaaaccaacattgcgaccgacggtggcgataggcatccgggtggtgctcaaaagcagcttcgcctggctgatacgttggtcctcgcgccagcttaagacgctaatccctaactgctggcggaaaagatgtgacagacgcgacggcgacaagcaaacatgctgtgcgacgctggcgatatcaaaattgctgtctgccaggtgatcgctgatgtactgacaagcctcgcgtacccgattatccatcggtggatggagcgactcgttaatcgcttccatgcgccgcagtaacaattgctcaagcagatttatcgccagcagctccgaatagcgcccttccccttgcccggcgttaatgatttgcccaaacaggtcgctgaaatgcggctggtgcgcttcatccgggcgaaagaaccccgtattggcaaatattgacggccagttaagccattcatgccagtaggcgcgcggacgaaagtaaacccactggtgataccattcgcgagcctccggatgacgaccgtagtgatgaatctctcctggcgggaacagcaaaatatcacccggtcggcaaacaaattctcgtccctgatttttcaccaccccctgaccgcgaatggtgagattaagaatataacctttcattcccagcggtcggtcgataaaaaaatcgagataaccgttggcctcaatcggcgttaaacccgccaccagatgggcattaaacgagtatcccggcagcaggggatcattttgcgcttcagccatacttttcatactcccaccattcagagaagaaaccaattgtccatattgcatcagacattgccgtcactgcgtcttttactggctcttctcgctaacccaaccggtaaccccgcttattaaaagcattctgtaacaaagcgggaccaaagccatgacaaaaacgcgtaacaaaagtgtctataatcacggcagaaaagtccacattgattatttgcacggcgtcacactttgctatgccatagcatttttatccataagattagcggatcctacctgacgctttttatcgcaactctctactgtttctccatacccgttttacctgcaggtgcagtaactaggacgagaggatatgatgagcaaagtcagtcaagatatcatcaaaaaaatcgaagaagcacagctaaagactgatgttcctgcgtttggtccaggtgacacagtagttgttaaagttcgcgttaccgaaggtgacaaagagcgtcttcaggcttatgaaggtgttgttatcgctaaacgtaaccgtggtctgcactcgtcttttaccgtgcgtaaaatttctagcggcgaaggcgttgagcgtgtgttccaaacacacagcccggcagtttcttcaattgaagtgaaacgtcgcggtgcggttcgtcgtgctaagctttactatctacgtgagcgttcaggtaaatctgcacgtatcaaagagaagcttaactaagattactaaagaatgcggagttttagcaatgcctaaaatgaaaactgtaagcggtgccgccaaacgttttaagaaaacgggttctggccgctttaaaagcaaacagtctcacttacgtcacattctgactaagaagagctctaagcgtaaacgtcaccttcgtggcaaaaaactggttcatgactctgataccaaattggttcagcgcatgttgccttacgtataagacttaggagactgattaatggctagagtaaaacgcggcactatcgcacgtgctcgtcacaaaaaagtcctcaagcaggcaaaaggttattacggcgcacgttcacgtgtatatcgcgtagcggtacaagctgtaactaaagctggtcaatatgcttaccgtgaccgtcgtcagcgcaagcgtcaattccgtcaactatggattgcacgtattaacgctgctgctcgtcaaaatggtatgtcatacagccgtttcatcaacggtttgaagaaagcgtctgttgaaatcgatcgtaagatccttgccgacatcgcagtacatgacaaagcagctttcagcgcactagtcgaagcggctaaaggcgcattagcttaattattaacgaggcagagcggagttaactatgtacgcggttttccaaagtggcggtaaacaacaccgtgtggccgaaggccaaaccgttcgtcttgaaaaaatcgaagtagccccaggcgaaacggttgaatttgacaaagttttaatggtaagcaacggtgacgacgtaaaaatcggcacaccaatcgttgctggtggtaaggtgactgctgaggttgttacacacggtcgtggcgataaagtaaaaatcgttaagttccgtcgtcgtaagcactctcgtaagcaagcgggtcaccgtcagtggttcacagaagtgaaaatcactggtatcaacgcataataggagcacgaacacatggcacacaaaaaagctggtggtagtaccaaaaacggtcgtgattcagaaagtaaacgcctaggtgttaagcgctttggtggtgaatctgttcttgctggtaacatcattgttcgtcaacgtggtactcgtttccacgctggtgacaacatgggtatcggtaaagaccacacgttgtttgcactaaaagacggtaaagttcagttcgacgttaaaggaccgaagaaccgtaaatttgtaagcatcgtagctgagtaagcgcgtaatatatttttggagacagacaatgtctgaagcaaatttcaaactagacgcttctgttcgtacagacctagggaaaggtgcgagccgccgcctacgtcgcgaagataagcttcctggtatcatctacggtggtgaagaagcaccagtttctatcacactagatcataacaaagtaaacaactctgctgactttgaagcgttttattctcacgttcttgagattaaccttgacggtaaagttgttgaagttctagttaaagatatgcaacgtcacccgttcaagccaaagatcacacacattgacttccaacgtgtaatcgctggtcaagacgttcacactaacgtaccacttcacttcgtaaatgaagagaaatctgctgctgttaaagctggcggtattgctgagcaccacgtaactgaaatcgaagttacttgtctacctaagaaccttcctgagttcatcgaagtagacatggctggtgttgaaatgggtcaaacgctacacctttctgacctaactcttccagctggcgtttcttcagttgaacttgcgaagaacgacgaagctcacgacctagcggttgtaactgttaagcctgctcctaaagcggctgacgcagaagaagacggcgaagaagcagcttctgaggaataatcctgttgttgttctggagacaaatacaatgtcaagagtatgccaagtaacaggtaagcgtccaacggttggtaataaccgttcacacgcaagaaatgcgactcgtcgtcgctttttgccaaaccttcaaacacaccgtttttgggttgagagcgaaaaccgttttgtaaaactacgtttgtctgcaaaaggcatgcgtatcatcgacaagaaaggtattgattcagtactaactgacatccgtacccgtggtgagaaaatctaaggaagccgacaatgcgtgataaaattaaactagtttcttcagcaggtacaggtttcttctacactactgataaaaacaagcgtaacatgcctggcaaaatggagatcaaaaagtatgatcccgttgtgcgtaagcacgttatgttcaaagaggccaaaatcaagtaattagcttgttattatgtgaggtaacccaatgaaacaagatatccacccaaaatacgaagaaatcacagcaacttgctcatgtggtaacgtaatgaacattcgttctacgcttggtaaagacatcaacctagacgtatgttcttcatgtcacccattctacactggtaagcaacgtaacgttgacactggtggtcgtgttgatcgcttcaagaagcgtttcggtgcattgggcaaaaagtaagcctgataagcgagaccaggagtaagttatggcagtacaacaaaatcgtaaaacgcgttctaagcgcggtatgcgtcgctcacacgatgcattgacaggcgcgactttgtctgtcgattcaacgtcgggcgaaactcaccgtcgtcaccacgtgaccgctgacggttattacaaaggcaagaaagtaatcggcgcgtaatacggcgaatataagtgagactttggtcatgaaaagaacatttcaaccgagcaatctaaagcgcaagcgttctcacggttttcgtgctcgtatggcgactaaaaatggtcgtaaagtactagcagctcgccgtgcaaaaggccgcgctcgtctttcagcttaattgaaagaacttaattaacggcactcctcagccaagtcaaaagcctccggtcggaggcttttgactacatgcccatggcgtttacgccccgccctgccactcatcgcagtactgttgtaattcattaagcattctgccgacatggaagccatcacaaacggcatgatgaacctgaatcgccagcggcatcagcaccttgtcgccttgcgtataatatttgcccatagtgaaaacgggggcgaagaagttgtccatattggccacgtttaaatcaaaactggtgaaactcacccagggattggctgagacgaaaaacatattctcaataaaccctttagggaaataggccaggttttcaccgtaacacgccacatcttgcgaatatatgtgtagaaactgccggaaatcgtcgtggtattcactccagagcgatgaaaacgtttcagtttgctcatggaaaacggtgtaacaagggtgaacactatcccatatcaccagctcaccgtctttcattgccatacggaactccggatgagcattcatcaggcgggcaagaatgtgaataaaggccggataaaacttgtgcttatttttctttacggtctttaaaaaggccgtaatatccagctgaacggtctggttataggtacattgagcaactgactgaaatgcctcaaaatgttctttacgatgccattgggatatatcaacggtggtatatccagtgatttttttctccattttagcttccttagctcctgaaaatctcgataactcaaaaaatacgcccggtagtgatcttatttcattatggtgaaagttggaacctcttacgtgccaagccaaataggccgt

SEQ ID NO: 264 - DNA, 6412 bp, Artificial
  Synthetic
tcagatccttccgtatttagccagtatgttctctagtgtggttcgttgtttttgcgtgagccatgagaacgaaccattgagatcatgcttactttgcatgtcactcaaaaattttgcctcaaaactggtgagctgaatttttgcagttaaagcatcgtgtagtgtttttcttagtccgttacgtaggtaggaatctgatgtaatggttgttggtattttgtcaccattcatttttatctggttgttctcaagttcggttacgagatccatttgtctatctagttcaacttggaaaatcaacgtatcagtcgggcggcctcgcttatcaaccaccaatttcatattgctgtaagtgtttaaatctttacttattggtttcaaaacccattggttaagccttttaaactcatggtagttattttcaagcattaacatgaacttaaattcatcaaggctaatctctatatttgccttgtgagttttcttttgtgttagttcttttaataaccactcataaatcctcatagagtatttgttttcaaaagacttaacatgttccagattatattttatgaatttttttaactggaaaagataaggcaatatctcttcactaaaaactaattctaatttttcgcttgagaacttggcatagtttgtccactggaaaatcttaaagcctttaaccaaaggattcctgatttccacagttctcgtcatcagctctctggttgctttagctaatacaccataagcattttccctactgatgttcatcatctgagcgtattggttataagtgaacgataccgtccgttctttccttgtagggttttcaatcgtggggttgagtagtgccacacagcataaaattagcttggtttcatgctccgttaagtcatagcgactaatcgctagttcatttgctttgaaaacaactaattcagacatacatctcaattggtctaggtgattttaatcactataccaattgagatgggctagtcaatgataattactagtccttttcctttgagttgtgggtatctgtaaattctgctagacctttgctggaaaacttgtaaattctgctagaccctctgtaaattccgctagacctttgtgtgttttttttgtttatattcaagtggttataatttatagaataaagaaagaataaaaaaagataaaaagaatagatcccagccctgtgtataactcactactttagtcagttccgcagtattacaaaaggatgtcgcaaacgctgtttgctcctctacaaaacagaccttaaaaccctaaaggcttaagtagcaccctcgcaagctcgggcaaatcgctgaatattccttttgtctccgaccatcaggcacctgagtcgctgtctttttcgtgacattcagttcgctgcgctcacggctctggcagtgaatgggggtaaatggcactacaggcgccttttatggattcatgcaaggaaactacccataatacaagaaaagcccgtcacgggcttctcagggcgttttatggcgggtctgctatgtggtgctatctgactttttgctgttcagcagttcctgccctctgattttccagtctgaccacttcggattatcccgtgacaggtcattcagactggctaatgcacccagtaaggcagcggtatcatcaacaggcttacccgtcttactgtcaagaggacatccggtcaaataaaacgaaaggctcagtcgaaagactgggcctttcgttttgctgaggagacttagggaccctttatgacaacttgacggctacatcattcactttttcttcacaaccggcacggaactcgctcgggctggccccggtgcattttttaaatacccgcgagaaatagagttgatcgtcaaaaccaacattgcgaccgacggtggcgataggcatccgggtggtgctcaaaagcagcttcgcctggctgatacgttggtcctcgcgccagcttaagacgctaatccctaactgctggcggaaaagatgtgacagacgcgacggcgacaagcaaacatgctgtgcgacgctggcgatatcaaaattgctgtctgccaggtgatcgctgatgtactgacaagcctcgcgtacccgattatccatcggtggatggagcgactcgttaatcgcttccatgcgccgcagtaacaattgctcaagcagatttatcgccagcagctccgaatagcgcccttccccttgcccggcgttaatgatttgcccaaacaggtcgctgaaatgcggctggtgcgcttcatccgggcgaaagaaccccgtattggcaaatattgacggccagttaagccattcatgccagtaggcgcgcggacgaaagtaaacccactggtgataccattcgcgagcctccggatgacgaccgtagtgatgaatctctcctggcgggaacagcaaaatatcacccggtcggcaaacaaattctcgtccctgatttttcaccaccccctgaccgcgaatggtgagattgagaatataacctttcattcccagcggtcggtcgataaaaaaatcgagataaccgttggcctcaatcggcgttaaacccgccaccagatgggcattaaacgagtatcccggcagcaggggatcattttgcgcttcagccatacttttcatactcccaccattcagagaagaaaccaattgtccatattgcatcagacattgccgtcactgcgtcttttactggctcttctcgctaacccaaccggtaaccccgcttattaaaagcattctgtaacaaagcgggaccaaagccatgacaaaaacgcgtaacaaaagtgtctataatcacggcagaaaagtccacattgattatttgcacggcgtcacactttgctatgccatagcatttttatccataagattagcggatcctacctgacgctttttatcgcaactctctactgtttctccatacccgttttacctgcaggtgcagttttattttgggagttacaccttggctaacattaagtctgctaagaagcgtgcaatccaagccgaaaagcgtcgtcagcacaacgctagccgtcgttcaatgactcgtacaagcatcaagaaagttatcgctgcaattgcaagcggtgacaaagaagcggcacaagctgcacttactgctgctactccagtacttgacagaatggctactaaaggcttgattcacaagaacaaagctgctcgtcataagagccgtctagctgcacaaatcaaagcactaggttaatctttacgacaacgagtttgaggcatttatggttactattcgtttacagcgtggtggcgcgaaaaagcgtccattttatcaactagtggtggctgatagccgtcgtgcaagaaacggtcgtttcattgaaaacatcggtttcttcaacccaactgcacaaggtcaagcggagcgtcttcgcgtagatctagagcgtgttgaatactgggttggtgtaggcgcgagcttatcagatcgcgtttctagcttggtaaaagaagcgaaaaaatctgcagcgtaagctgttatttaaaagttatttgagacttatgactgaaaattttgcacaactttttgaagaaagcttacaagaactagaaacacgtcctggttcaattgtaaaaggtactgttgtttctatcgacaaagacatcgttcttgttgatgcaggcttgaaatcagaaagtgctatcccagctgaccaattcaaaaacgctgaaggcgaactagaaatcgctatcggtgaccaagtagacgtagcactagatgcagttgaagatggtttcggtgaaactatcctttctcgcgaaaaagcgaagcgtcacgaagcgtgggttgagctggaaaaagcttacgaagataaagctactatcaaaggcgttatcaacggtaaagttaaaggtggtttcactgttgaagttaacagtgtacgcgcgttccttcctggttctcttgttgacgtacgtccagtacgtgacactacgcaccttgaaggcaaagagcttgaatttaaagttatcaagcttgacgctaagcgtaacaacgttgttgtttctcgtcgtgcagttatcgaagcagaaagcagcgcagagcgcgaaacgcttcttgctaaccttgaagaaggtcatgaaatcaagggtatcgttaagaaccttaccgattacggtgcgttcgttgaccttggtggcgtagacggtcttctacacatcactgacatggcttggaagcgcgttaagcacccaagtgaaatcgtgaatgttggtgacgaaatcaacgttaaagtacttaagttcgacaaagagaagcagcgtgtttctcttggcatgaagcaaatgggcaacgatccatggcaagaaattgcttctcgttacccagaaggtactaagatcaacggtcaggttactaaccttactgactacggctgcttcgttgaaatcgaagacggcgttgaaggtcttgtacacgtttctgaaatggattggactaacaagaacatccacccatctaaagttgttaacctaggtgacactgtagatgtaatggttcttgaaattgacgaagagcgtcgtcgtatttctctaggtcttaagcagtgcattgctaacccttgggaaacatttgctgagtcacacgaaaaaggtgacaaagtgtctggtaagatcaagtcaatcactgacttcggtatcttcatcggtcttgacggcggcatcgacggtctagttcacctttctgacatcagctggaacaagtctggtgaagacgcggttcgcgactacaagaaaggcgacgaaatctctgcagttgtacttcaagtcgacccagagcgtgagcgtatctctcttggcgttaagcaaatcgaagaagatcctttcaacaagtatctgacagataacaagaaaggtgctatcgttactggtacagtaacagcagttgatgcgaaaggcgttactgtaaacctagctgaagaagttgacggctacatccgcgttgcagatcttgctgtagagcgtgttgaagacgcaacagaagtagcaagcgttggtgatagcatcgaagcgaagttcatgggcgttgaccgtaagaaccgcactgttaacctatctgttaaagcgaaagatcaggctgacgaaaaagaagctatcgataaagttaaccagcaagaagatgttggtttcgctaacgcgatggcagaagcatttaaagctgctaaaggcgaataatgcttttgattaatattaggagaatgatatgtcactaactaaagcagaaaccgcaaaaatcattgctgagtacggcgttaaagaaggcgacactggttcaccagaagttcaagttgctttgcttactcacaacatcaacaagcttcaaggtcactttgctgatcacaagaaagatcaccactcacgtcgtggtcttctacgtatggttagccaacgtcgtaagcttctagactaccttaaaggcaagaacgcagagcgttaccttgaccttatcaagcgtctaggtctacgtcgataagactaggtacttaattaacggcactcctcagccaagtcaaaagcctccggtcggaggcttttgactacatgcccatggcgtttacgccccgccctgccactcatcgcagtactgttgtaattcattaagcattctgccgacatggaagccatcacaaacggcatgatgaacctgaatcgccagcggcatcagcaccttgtcgccttgcgtataatatttgcccatagtgaaaacgggggcgaagaagttgtccatattggccacgtttaaatcaaaactggtgaaactcacccagggattggctgagacgaaaaacatattctcaataaaccctttagggaaataggccaggttttcaccgtaacacgccacatcttgcgaatatatgtgtagaaactgccggaaatcgtcgtggtattcactccagagcgatgaaaacgtttcagtttgctcatggaaaacggtgtaacaagggtgaacactatcccatatcaccagctcaccgtctttcattgccatacggaactccggatgagcattcatcaggcgggcaagaatgtgaataaaggccggataaaacttgtgcttatttttctttacggtctttaaaaaggccgtaatatccagctgaacggtctggttataggtacattgagcaactgactgaaatgcctcaaaatgttctttacgatgccattgggatatatcaacggtggtatatccagtgatttttttctccattttagcttccttagctcctgaaaatctcgataactcaaaaaatacgcccggtagtgatcttatttcattatggtgaaagttggaacctcttacgtgccaggccaaataggccgt

SEQ ID NO: 265 - DNA, 6753 bp, Artificial
  Synthetic
tcagatccttccgtatttagccagtatgttctctagtgtggttcgttgtttttgcgtgagccatgagaacgaaccattgagatcatgcttactttgcatgtcactcaaaaattttgcctcaaaactggtgagctgaatttttgcagttaaagcatcgtgtagtgtttttcttagtccgttacgtaggtaggaatctgatgtaatggttgttggtattttgtcaccattcatttttatctggttgttctcaagttcggttacgagatccatttgtctatctagttcaacttggaaaatcaacgtatcagtcgggcggcctcgcttatcaaccaccaatttcatattgctgtaagtgtttaaatctttacttattggtttcaaaacccattggttaagccttttaaactcatggtagttattttcaagcattaacatgaacttaaattcatcaaggctaatctctatatttgccttgtgagttttcttttgtgttagttcttttaataaccactcataaatcctcatagagtatttgttttcaaaagacttaacatgttccagattatattttatgaatttttttaactggaaaagataaggcaatatctcttcactaaaaactaattctaatttttcgcttgagaacttggcatagtttgtccactggaaaatcttaaagcctttaaccaaaggattcctgatttccacagttctcgtcatcagctctctggttgctttagctaatacaccataagcattttccctactgatgttcatcatctgagcgtattggttataagtgaacgataccgtccgttctttccttgtagggttttcaatcgtggggttgagtagtgccacacagcataaaattagcttggtttcatgctccgttaagtcatagcgactaatcgctagttcatttgctttgaaaacaactaattcagacatacatctcaattggtctaggtgattttaatcactataccaattgagatgggctagtcaatgataattactagtccttttcctttgagttgtgggtatctgtaaattctgctagacctttgctggaaaacttgtaaattctgctagaccctctgtaaattccgctagacctttgtgtgttttttttgtttatattcaagtggttataatttatagaataaagaaagaataaaaaaagataaaaagaatagatcccagccctgtgtataactcactactttagtcagttccgcagtattacaaaaggatgtcgcaaacgctgtttgctcctctacaaaacagaccttaaaaccctaaaggcttaagtagcaccctcgcaagctcgggcaaatcgctgaatattccttttgtctccgaccatcaggcacctgagtcgctgtctttttcgtgacattcagttcgctgcgctcacggctctggcagtgaatgggggtaaatggcactacaggcgccttttatggattcatgcaaggaaactacccataatacaagaaaagcccgtcacgggcttctcagggcgttttatggcgggtctgctatgtggtgctatctgactttttgctgttcagcagttcctgccctctgattttccagtctgaccacttcggattatcccgtgacaggtcattcagactggctaatgcacccagtaaggcagcggtatcatcaacaggcttacccgtcttactgtcaagaggacatccggtcaaataaaacgaaaggctcagtcgaaagactgggcctttcgttttgctgaggagacttagggaccctttatgacaacttgacggctacatcattcactttttcttcacaaccggcacggaactcgctcgggctggccccggtgcattttttaaatacccgcgagaaatagagttgatcgtcaaaaccaacattgcgaccgacggtggcgataggcatccgggtggtgctcaaaagcagcttcgcctggctgatacgttggtcctcgcgccagcttaagacgctaatccctaactgctggcggaaaagatgtgacagacgcgacggcgacaagcaaacatgctgtgcgacgctggcgatatcaaaattgctgtctgccaggtgatcgctgatgtactgacaagcctcgcgtacccgattatccatcggtggatggagcgactcgttaatcgcttccatgcgccgcagtaacaattgctcaagcagatttatcgccagcagctccgaatagcgcccttccccttgcccggcgttaatgatttgcccaaacaggtcgctgaaatgcggctggtgcgcttcatccgggcgaaagaaccccgtattggcaaatattgacggccagttaagccattcatgccagtaggcgcgcggacgaaagtaaacccactggtgataccattcgcgagcctccggatgacgaccgtagtgatgaatctctcctggcgggaacagcaaaatatcacccggtcggcaaacaaattctcgtccctgatttttcaccaccccctgaccgcgaatggtgagattgagaatataacctttcattcccagcggtcggtcgataaaaaaatcgagataaccgttggcctcaatcggcgttaaacccgccaccagatgggcattaaacgagtatcccggcagcaggggatcattttgcgcttcagccatacttttcatactcccaccattcagagaagaaaccaattgtccatattgcatcagacattgccgtcactgcgtcttttactggctcttctcgctaacccaaccggtaaccccgcttattaaaagcattctgtaacaaagcgggaccaaagccatgacaaaaacgcgtaacaaaagtgtctataatcacggcagaaaagtccacattgattatttgcacggcgtcacactttgctatgccatagcatttttatccataagattagcggatcctacctgacgctttttatcgcaactctctactgtttctccatacccgttttacctgcaggtgcagtaagaatgcggagttttagcaatgcctaaaatgaaaactgtaagcggtgccgccaaacgttttaagaaaacgggttctggccgctttaaaagcaaacagtctcacttacgtcacattctgactaagaagagctctaagcgtaaacgtcaccttcgtggcaaaaaactggttcatgactctgataccaaattggttcagcgcatgttgccttacgtataagacttaggagactgattaatggctagagtaaaacgcggcactatcgcacgtgctcgtcacaaaaaagtcctcaagcaggcaaaaggttattacggcgcacgttcacgtgtatatcgcgtagcggtacaagctgtaactaaagctggtcaatatgcttaccgtgaccgtcgtcagcgcaagcgtcaattccgtcaactatggattgcacgtattaacgctgctgctcgtcaaaatggtatgtcatacagccgtttcatcaacggtttgaagaaagcgtctgttgaaatcgatcgtaagatccttgccgacatcgcagtacatgacaaagcagctttcagcgcactagtcgaagcggctaaaggcgcattagcttaattattaacgaggcagagcggagttaactatgtacgcggttttccaaagtggcggtaaacaacaccgtgtggccgaaggccaaaccgttcgtcttgaaaaaatcgaagtagccccaggcgaaacggttgaatttgacaaagttttaatggtaagcaacggtgacgacgtaaaaatcggcacaccaatcgttgctggtggtaaggtgactgctgaggttgttacacacggtcgtggcgataaagtaaaaatcgttaagttccgtcgtcgtaagcactctcgtaagcaagcgggtcaccgtcagtggttcacagaagtgaaaatcactggtatcaacgcataataggagcacgaacacatggcacacaaaaaagctggtggtagtaccaaaaacggtcgtgattcagaaagtaaacgcctaggtgttaagcgctttggtggtgaatctgttcttgctggtaacatcattgttcgtcaacgtggtactcgtttccacgctggtgacaacatgggtatcggtaaagaccacacgttgtttgcactaaaagacggtaaagttcagttcgacgttaaaggaccgaagaaccgtaaatttgtaagcatcgtagctgagtaagcgcgtaatatatttttggagacagacaatgtctgaagcaaatttcaaactagacgcttctgttcgtacagacctagggaaaggtgcgagccgccgcctacgtcgcgaagataagcttcctggtatcatctacggtggtgaagaagcaccagtttctatcacactagatcataacaaagtaaacaactctgctgactttgaagcgttttattctcacgttcttgagattaaccttgacggtaaagttgttgaagttctagttaaagatatgcaacgtcacccgttcaagccaaagatcacacacattgacttccaacgtgtaatcgctggtcaagacgttcacactaacgtaccacttcacttcgtaaatgaagagaaatctgctgctgttaaagctggcggtattgctgagcaccacgtaactgaaatcgaagttacttgtctacctaagaaccttcctgagttcatcgaagtagacatggctggtgttgaaatgggtcaaacgctacacctttctgacctaactcttccagctggcgtttcttcagttgaacttgcgaagaacgacgaagctcacgacctagcggttgtaactgttaagcctgctcctaaagcggctgacgcagaagaagacggcgaagaagcagcttctgaggaataatcctgttgttgttctggagacaaatacaatgtcaagagtatgccaagtaacaggtaagcgtccaacggttggtaataaccgttcacacgcaagaaatgcgactcgtcgtcgctttttgccaaaccttcaaacacaccgtttttgggttgagagcgaaaaccgttttgtaaaactacgtttgtctgcaaaaggcatgcgtatcatcgacaagaaaggtattgattcagtactaactgacatccgtacccgtggtgagaaaatctaaggaagccgacaatgcgtgataaaattaaactagtttcttcagcaggtacaggtttcttctacactactgataaaaacaagcgtaacatgcctggcaaaatggagatcaaaaagtatgatcccgttgtgcgtaagcacgttatgttcaaagaggccaaaatcaagtaattagcttgttattatgtgaggtaacccaatgaaacaagatatccacccaaaatacgaagaaatcacagcaacttgctcatgtggtaacgtaatgaacattcgttctacgcttggtaaagacatcaacctagacgtatgttcttcatgtcacccattctacactggtaagcaacgtaacgttgacactggtggtcgtgttgatcgcttcaagaagcgtttcggtgcattgggcaaaaagtaagcctgataagcgagaccaggagtaagttatggcagtacaacaaaatcgtaaaacgcgttctaagcgcggtatgcgtcgctcacacgatgcattgacaggcgcgactttgtctgtcgattcaacgtcgggcgaaactcaccgtcgtcaccacgtgaccgctgacggttattacaaaggcaagaaagtaatcggcgcgtaatacggcgaatataagtgagactttggtcatgaaaagaacatttcaaccgagcaatctaaagcgcaagcgttctcacggttttcgtgctcgtatggcgactaaaaatggtcgtaaagtactagcagctcgccgtgcaaaaggccgcgctcgtctttcagcttaattgaaagaacttaattaacggcactcctcagccaagtcaaaagcctccggtcggaggcttttgactacatgcccatggcgtttacgccccgccctgccactcatcgcagtactgttgtaattcattaagcattctgccgacatggaagccatcacaaacggcatgatgaacctgaatcgccagcggcatcagcaccttgtcgccttgcgtataatatttgcccatagtgaaaacgggggcgaagaagttgtccatattggccacgtttaaatcaaaactggtgaaactcacccagggattggctgagacgaaaaacatattctcaataaaccctttagggaaataggccaggttttcaccgtaacacgccacatcttgcgaatatatgtgtagaaactgccggaaatcgtcgtggtattcactccagagcgatgaaaacgtttcagtttgctcatggaaaacggtgtaacaagggtgaacactatcccatatcaccagctcaccgtctttcattgccatacggaactccggatgagcattcatcaggcgggcaagaatgtgaataaaggccggataaaacttgtgcttatttttctttacggtctttaaaaaggccgtaatatccagctgaacggtctggttataggtacattgagcaactgactgaaatgcctcaaaatgttctttacgatgccattgggatatatcaacggtggtatatccagtgatttttttctccattttagcttccttagctcctgaaaatctcgataactcaaaaaatacgcccggtagtgatcttatttcattatggtgaaagttggaacctcttacgtgccaagccaaataggccgt

SEQ ID NO: 266 - DNA, 6537 bp, Artificial
  Synthetic
tcagatccttccgtatttagccagtatgttctctagtgtggttcgttgtttttgcgtgagccatgagaacgaaccattgagatcatgcttactttgcatgtcactcaaaaattttgcctcaaaactggtgagctgaatttttgcagttaaagcatcgtgtagtgtttttcttagtccgttacgtaggtaggaatctgatgtaatggttgttggtattttgtcaccattcatttttatctggttgttctcaagttcggttacgagatccatttgtctatctagttcaacttggaaaatcaacgtatcagtcgggcggcctcgcttatcaaccaccaatttcatattgctgtaagtgtttaaatctttacttattggtttcaaaacccattggttaagccttttaaactcatggtagttattttcaagcattaacatgaacttaaattcatcaaggctaatctctatatttgccttgtgagttttcttttgtgttagttcttttaataaccactcataaatcctcatagagtatttgttttcaaaagacttaacatgttccagattatattttatgaatttttttaactggaaaagataaggcaatatctcttcactaaaaactaattctaatttttcgcttgagaacttggcatagtttgtccactggaaaatcttaaagcctttaaccaaaggattcctgatttccacagttctcgtcatcagctctctggttgctttagctaatacaccataagcattttccctactgatgttcatcatctgagcgtattggttataagtgaacgataccgtccgttctttccttgtagggttttcaatcgtggggttgagtagtgccacacagcataaaattagcttggtttcatgctccgttaagtcatagcgactaatcgctagttcatttgctttgaaaacaactaattcagacatacatctcaattggtctaggtgattttaatcactataccaattgagatgggctagtcaatgataattactagtccttttcctttgagttgtgggtatctgtaaattctgctagacctttgctggaaaacttgtaaattctgctagaccctctgtaaattccgctagacctttgtgtgttttttttgtttatattcaagtggttataatttatagaataaagaaagaataaaaaaagataaaaagaatagatcccagccctgtgtataactcactactttagtcagttccgcagtattacaaaaggatgtcgcaaacgctgtttgctcctctacaaaacagaccttaaaaccctaaaggcttaagtagcaccctcgcaagctcgggcaaatcgctgaatattccttttgtctccgaccatcaggcacctgagtcgctgtctttttcgtgacattcagttcgctgcgctcacggctctggcagtgaatgggggtaaatggcactacaggcgccttttatggattcatgcaaggaaactacccataatacaagaaaagcccgtcacgggcttctcagggcgttttatggcgggtctgctatgtggtgctatctgactttttgctgttcagcagttcctgccctctgattttccagtctgaccacttcggattatcccgtgacaggtcattcagactggctaatgcacccagtaaggcagcggtatcatcaacaggcttacccgtcttactgtcaagaggacatccggtcaaataaaacgaaaggctcagtcgaaagactgggcctttcgttttgctgaggagacttagggaccctttatgacaacttgacggctacatcattcactttttcttcacaaccggcacggaactcgctcgggctggccccggtgcattttttaaatacccgcgagaaatagagttgatcgtcaaaaccaacattgcgaccgacggtggcgataggcatccgggtggtgctcaaaagcagcttcgcctggctgatacgttggtcctcgcgccagcttaagacgctaatccctaactgctggcggaaaagatgtgacagacgcgacggcgacaagcaaacatgctgtgcgacgctggcgatatcaaaattgctgtctgccaggtgatcgctgatgtactgacaagcctcgcgtacccgattatccatcggtggatggagcgactcgttaatcgcttccatgcgccgcagtaacaattgctcaagcagatttatcgccagcagctccgaatagcgcccttccccttgcccggcgttaatgatttgcccaaacaggtcgctgaaatgcggctggtgcgcttcatccgggcgaaagaaccccgtattggcaaatattgacggccagttaagccattcatgccagtaggcgcgcggacgaaagtaaacccactggtgataccattcgcgagcctccggatgacgaccgtagtgatgaatctctcctggcgggaacagcaaaatatcacccggtcggcaaacaaattctcgtccctgatttttcaccaccccctgaccgcgaatggtgagattgagaatataacctttcattcccagcggtcggtcgataaaaaaatcgagataaccgttggcctcaatcggcgttaaacccgccaccagatgggcattaaacgagtatcccggcagcaggggatcattttgcgcttcagccatacttttcatactcccaccattcagagaagaaaccaattgtccatattgcatcagacattgccgtcactgcgtcttttactggctcttctcgctaacccaaccggtaaccccgcttattaaaagcattctgtaacaaagcgggaccaaagccatgacaaaaacgcgtaacaaaagtgtctataatcacggcagaaaagtccacattgattatttgcacggcgtcacactttgctatgccatagcatttttatccataagattagcggatcctacctgacgctttttatcgcaactctctactgtttctccatacccgttttacctgcaggtgcagtaagacttaggagactgattaatggctagagtaaaacgcggcactatcgcacgtgctcgtcacaaaaaagtcctcaagcaggcaaaaggttattacggcgcacgttcacgtgtatatcgcgtagcggtacaagctgtaactaaagctggtcaatatgcttaccgtgaccgtcgtcagcgcaagcgtcaattccgtcaactatggattgcacgtattaacgctgctgctcgtcaaaatggtatgtcatacagccgtttcatcaacggtttgaagaaagcgtctgttgaaatcgatcgtaagatccttgccgacatcgcagtacatgacaaagcagctttcagcgcactagtcgaagcggctaaaggcgcattagcttaattattaacgaggcagagcggagttaactatgtacgcggttttccaaagtggcggtaaacaacaccgtgtggccgaaggccaaaccgttcgtcttgaaaaaatcgaagtagccccaggcgaaacggttgaatttgacaaagttttaatggtaagcaacggtgacgacgtaaaaatcggcacaccaatcgttgctggtggtaaggtgactgctgaggttgttacacacggtcgtggcgataaagtaaaaatcgttaagttccgtcgtcgtaagcactctcgtaagcaagcgggtcaccgtcagtggttcacagaagtgaaaatcactggtatcaacgcataataggagcacgaacacatggcacacaaaaaagctggtggtagtaccaaaaacggtcgtgattcagaaagtaaacgcctaggtgttaagcgctttggtggtgaatctgttcttgctggtaacatcattgttcgtcaacgtggtactcgtttccacgctggtgacaacatgggtatcggtaaagaccacacgttgtttgcactaaaagacggtaaagttcagttcgacgttaaaggaccgaagaaccgtaaatttgtaagcatcgtagctgagtaagcgcgtaatatatttttggagacagacaatgtctgaagcaaatttcaaactagacgcttctgttcgtacagacctagggaaaggtgcgagccgccgcctacgtcgcgaagataagcttcctggtatcatctacggtggtgaagaagcaccagtttctatcacactagatcataacaaagtaaacaactctgctgactttgaagcgttttattctcacgttcttgagattaaccttgacggtaaagttgttgaagttctagttaaagatatgcaacgtcacccgttcaagccaaagatcacacacattgacttccaacgtgtaatcgctggtcaagacgttcacactaacgtaccacttcacttcgtaaatgaagagaaatctgctgctgttaaagctggcggtattgctgagcaccacgtaactgaaatcgaagttacttgtctacctaagaaccttcctgagttcatcgaagtagacatggctggtgttgaaatgggtcaaacgctacacctttctgacctaactcttccagctggcgtttcttcagttgaacttgcgaagaacgacgaagctcacgacctagcggttgtaactgttaagcctgctcctaaagcggctgacgcagaagaagacggcgaagaagcagcttctgaggaataatcctgttgttgttctggagacaaatacaatgtcaagagtatgccaagtaacaggtaagcgtccaacggttggtaataaccgttcacacgcaagaaatgcgactcgtcgtcgctttttgccaaaccttcaaacacaccgtttttgggttgagagcgaaaaccgttttgtaaaactacgtttgtctgcaaaaggcatgcgtatcatcgacaagaaaggtattgattcagtactaactgacatccgtacccgtggtgagaaaatctaaggaagccgacaatgcgtgataaaattaaactagtttcttcagcaggtacaggtttcttctacactactgataaaaacaagcgtaacatgcctggcaaaatggagatcaaaaagtatgatcccgttgtgcgtaagcacgttatgttcaaagaggccaaaatcaagtaattagcttgttattatgtgaggtaacccaatgaaacaagatatccacccaaaatacgaagaaatcacagcaacttgctcatgtggtaacgtaatgaacattcgttctacgcttggtaaagacatcaacctagacgtatgttcttcatgtcacccattctacactggtaagcaacgtaacgttgacactggtggtcgtgttgatcgcttcaagaagcgtttcggtgcattgggcaaaaagtaagcctgataagcgagaccaggagtaagttatggcagtacaacaaaatcgtaaaacgcgttctaagcgcggtatgcgtcgctcacacgatgcattgacaggcgcgactttgtctgtcgattcaacgtcgggcgaaactcaccgtcgtcaccacgtgaccgctgacggttattacaaaggcaagaaagtaatcggcgcgtaatacggcgaatataagtgagactttggtcatgaaaagaacatttcaaccgagcaatctaaagcgcaagcgttctcacggttttcgtgctcgtatggcgactaaaaatggtcgtaaagtactagcagctcgccgtgcaaaaggccgcgctcgtctttcagcttaattgaaagaacttaattaacggcactcctcagccaagtcaaaagcctccggtcggaggcttttgactacatgcccatggcgtttacgccccgccctgccactcatcgcagtactgttgtaattcattaagcattctgccgacatggaagccatcacaaacggcatgatgaacctgaatcgccagcggcatcagcaccttgtcgccttgcgtataatatttgcccatagtgaaaacgggggcgaagaagttgtccatattggccacgtttaaatcaaaactggtgaaactcacccagggattggctgagacgaaaaacatattctcaataaaccctttagggaaataggccaggttttcaccgtaacacgccacatcttgcgaatatatgtgtagaaactgccggaaatcgtcgtggtattcactccagagcgatgaaaacgtttcagtttgctcatggaaaacggtgtaacaagggtgaacactatcccatatcaccagctcaccgtctttcattgccatacggaactccggatgagcattcatcaggcgggcaagaatgtgaataaaggccggataaaacttgtgcttatttttctttacggtctttaaaaaggccgtaatatccagctgaacggtctggttataggtacattgagcaactgactgaaatgcctcaaaatgttctttacgatgccattgggatatatcaacggtggtatatccagtgatttttttctccattttagcttccttagctcctgaaaatctcgataactcaaaaaatacgcccggtagtgatcttatttcattatggtgaaagttggaacctcttacgtgccaagccaaataggccgt

SEQ ID NO: 267 - DNA, 6378 bp, Artificial
  Synthetic
tcagatccttccgtatttagccagtatgttctctagtgtggttcgttgtttttgcgtgagccatgagaacgaaccattgagatcatgcttactttgcatgtcactcaaaaattttgcctcaaaactggtgagctgaatttttgcagttaaagcatcgtgtagtgtttttcttagtccgttacgtaggtaggaatctgatgtaatggttgttggtattttgtcaccattcatttttatctggttgttctcaagttcggttacgagatccatttgtctatctagttcaacttggaaaatcaacgtatcagtcgggcggcctcgcttatcaaccaccaatttcatattgctgtaagtgtttaaatctttacttattggtttcaaaacccattggttaagccttttaaactcatggtagttattttcaagcattaacatgaacttaaattcatcaaggctaatctctatatttgccttgtgagttttcttttgtgttagttcttttaataaccactcataaatcctcatagagtatttgttttcaaaagacttaacatgttccagattatattttatgaatttttttaactggaaaagataaggcaatatctcttcactaaaaactaattctaatttttcgcttgagaacttggcatagtttgtccactggaaaatcttaaagcctttaaccaaaggattcctgatttccacagttctcgtcatcagctctctggttgctttagctaatacaccataagcattttccctactgatgttcatcatctgagcgtattggttataagtgaacgataccgtccgttctttccttgtagggttttcaatcgtggggttgagtagtgccacacagcataaaattagcttggtttcatgctccgttaagtcatagcgactaatcgctagttcatttgctttgaaaacaactaattcagacatacatctcaattggtctaggtgattttaatcactataccaattgagatgggctagtcaatgataattactagtccttttcctttgagttgtgggtatctgtaaattctgctagacctttgctggaaaacttgtaaattctgctagaccctctgtaaattccgctagacctttgtgtgttttttttgtttatattcaagtggttataatttatagaataaagaaagaataaaaaaagataaaaagaatagatcccagccctgtgtataactcactactttagtcagttccgcagtattacaaaaggatgtcgcaaacgctgtttgctcctctacaaaacagaccttaaaaccctaaaggcttaagtagcaccctcgcaagctcgggcaaatcgctgaatattccttttgtctccgaccatcaggcacctgagtcgctgtctttttcgtgacattcagttcgctgcgctcacggctctggcagtgaatgggggtaaatggcactacaggcgccttttatggattcatgcaaggaaactacccataatacaagaaaagcccgtcacgggcttctcagggcgttttatggcgggtctgctatgtggtgctatctgactttttgctgttcagcagttcctgccctctgattttccagtctgaccacttcggattatcccgtgacaggtcattcagactggctaatgcacccagtaaggcagcggtatcatcaacaggcttacccgtcttactgtcaagaggacatccggtcaaataaaacgaaaggctcagtcgaaagactgggcctttcgttttgctgaggagacttagggaccctttatgacaacttgacggctacatcattcactttttcttcacaaccggcacggaactcgctcgggctggccccggtgcattttttaaatacccgcgagaaatagagttgatcgtcaaaaccaacattgcgaccgacggtggcgataggcatccgggtggtgctcaaaagcagcttcgcctggctgatacgttggtcctcgcgccagcttaagacgctaatccctaactgctggcggaaaagatgtgacagacgcgacggcgacaagcaaacatgctgtgcgacgctggcgatatcaaaattgctgtctgccaggtgatcgctgatgtactgacaagcctcgcgtacccgattatccatcggtggatggagcgactcgttaatcgcttccatgcgccgcagtaacaattgctcaagcagatttatcgccagcagctccgaatagcgcccttccccttgcccggcgttaatgatttgcccaaacaggtcgctgaaatgcggctggtgcgcttcatccgggcgaaagaaccccgtattggcaaatattgacggccagttaagccattcatgccagtaggcgcgcggacgaaagtaaacccactggtgataccattcgcgagcctccggatgacgaccgtagtgatgaatctctcctggcgggaacagcaaaatatcacccggtcggcaaacaaattctcgtccctgatttttcaccaccccctgaccgcgaatggtgagattaagaatataacctttcattcccagcggtcggtcgataaaaaaatcgagataaccgttggcctcaatcggcgttaaacccgccaccagatgggcattaaacgagtatcccggcagcaggggatcattttgcgcttcagccatacttttcatactcccaccattcagagaagaaaccaattgtccatattgcatcagacattgccgtcactgcgtcttttactggctcttctcgctaacccaaccggtaaccccgcttattaaaagcattctgtaacaaagcgggaccaaagccatgacaaaaacgcgtaacaaaagtgtctataatcacggcagaaaagtccacattgattatttgcacggcgtcacactttgctatgccatagcatttttatccataagattagcggatcctacctgacgctttttatcgcaactctctactgtttctccatacccgttttacctgcaggtgcagtaagaatgcggagttttagcaatgcctaaaatgaaaactgtaagcggtgccgccaaacgttttaagaaaacgggttctggccgctttaaaagcaaacagtctcacttacgtcacattctgactaagaagagctctaagcgtaaacgtcaccttcgtggcaaaaaactggttcatgactctgataccaaattggttcagcgcatgttgccttacgtataagacttagggaggcagagcggagttaactatgtacgcggttttccaaagtggcggtaaacaacaccgtgtggccgaaggccaaaccgttcgtcttgaaaaaatcgaagtagccccaggcgaaacggttgaatttgacaaagttttaatggtaagcaacggtgacgacgtaaaaatcggcacaccaatcgttgctggtggtaaggtgactgctgaggttgttacacacggtcgtggcgataaagtaaaaatcgttaagttccgtcgtcgtaagcactctcgtaagcaagcgggtcaccgtcagtggttcacagaagtgaaaatcactggtatcaacgcataataggagcacgaacacatggcacacaaaaaagctggtggtagtaccaaaaacggtcgtgattcagaaagtaaacgcctaggtgttaagcgctttggtggtgaatctgttcttgctggtaacatcattgttcgtcaacgtggtactcgtttccacgctggtgacaacatgggtatcggtaaagaccacacgttgtttgcactaaaagacggtaaagttcagttcgacgttaaaggaccgaagaaccgtaaatttgtaagcatcgtagctgagtaagcgcgtaatatatttttggagacagacaatgtctgaagcaaatttcaaactagacgcttctgttcgtacagacctagggaaaggtgcgagccgccgcctacgtcgcgaagataagcttcctggtatcatctacggtggtgaagaagcaccagtttctatcacactagatcataacaaagtaaacaactctgctgactttgaagcgttttattctcacgttcttgagattaaccttgacggtaaagttgttgaagttctagttaaagatatgcaacgtcacccgttcaagccaaagatcacacacattgacttccaacgtgtaatcgctggtcaagacgttcacactaacgtaccacttcacttcgtaaatgaagagaaatctgctgctgttaaagctggcggtattgctgagcaccacgtaactgaaatcgaagttacttgtctacctaagaaccttcctgagttcatcgaagtagacatggctggtgttgaaatgggtcaaacgctacacctttctgacctaactcttccagctggcgtttcttcagttgaacttgcgaagaacgacgaagctcacgacctagcggttgtaactgttaagcctgctcctaaagcggctgacgcagaagaagacggcgaagaagcagcttctgaggaataatcctgttgttgttctggagacaaatacaatgtcaagagtatgccaagtaacaggtaagcgtccaacggttggtaataaccgttcacacgcaagaaatgcgactcgtcgtcgctttttgccaaaccttcaaacacaccgtttttgggttgagagcgaaaaccgttttgtaaaactacgtttgtctgcaaaaggcatgcgtatcatcgacaagaaaggtattgattcagtactaactgacatccgtacccgtggtgagaaaatctaaggaagccgacaatgcgtgataaaattaaactagtttcttcagcaggtacaggtttcttctacactactgataaaaacaagcgtaacatgcctggcaaaatggagatcaaaaagtatgatcccgttgtgcgtaagcacgttatgttcaaagaggccaaaatcaagtaattagcttgttattatgtgaggtaacccaatgaaacaagatatccacccaaaatacgaagaaatcacagcaacttgctcatgtggtaacgtaatgaacattcgttctacgcttggtaaagacatcaacctagacgtatgttcttcatgtcacccattctacactggtaagcaacgtaacgttgacactggtggtcgtgttgatcgcttcaagaagcgtttcggtgcattgggcaaaaagtaagcctgataagcgagaccaggagtaagttatggcagtacaacaaaatcgtaaaacgcgttctaagcgcggtatgcgtcgctcacacgatgcattgacaggcgcgactttgtctgtcgattcaacgtcgggcgaaactcaccgtcgtcaccacgtgaccgctgacggttattacaaaggcaagaaagtaatcggcgcgtaatacggcgaatataagtgagactttggtcatgaaaagaacatttcaaccgagcaatctaaagcgcaagcgttctcacggttttcgtgctcgtatggcgactaaaaatggtcgtaaagtactagcagctcgccgtgcaaaaggccgcgctcgtctttcagcttaattgaaagaacttaattaacggcactcctcagccaagtcaaaagcctccggtcggaggcttttgactacatgcccatggcgtttacgccccgccctgccactcatcgcagtactgttgtaattcattaagcattctgccgacatggaagccatcacaaacggcatgatgaacctgaatcgccagcggcatcagcaccttgtcgccttgcgtataatatttgcccatagtgaaaacgggggcgaagaagttgtccatattggccacgtttaaatcaaaactggtgaaactcacccagggattggctgagacgaaaaacatattctcaataaaccctttagggaaataggccaggttttcaccgtaacacgccacatcttgcgaatatatgtgtagaaactgccggaaatcgtcgtggtattcactccagagcgatgaaaacgtttcagtttgctcatggaaaacggtgtaacaagggtgaacactatcccatatcaccagctcaccgtctttcattgccatacggaactccggatgagcattcatcaggcgggcaagaatgtgaataaaggccggataaaacttgtgcttatttttctttacggtctttaaaaaggccgtaatatccagctgaacggtctggttataggtacattgagcaactgactgaaatgcctcaaaatgttctttacgatgccattgggatatatcaacggtggtatatccagtgatttttttctccattttagcttccttagctcctgaaaatctcgataactcaaaaaatacgcccggtagtgatcttatttcattatggtgaaagttggaacctcttacgtgccaagccaaataggccgt

SEQ ID NO: 268 - DNA, 6426 bp, Artificial
  Synthetic
tcagatccttccgtatttagccagtatgttctctagtgtggttcgttgtttttgcgtgagccatgagaacgaaccattgagatcatgcttactttgcatgtcactcaaaaattttgcctcaaaactggtgagctgaatttttgcagttaaagcatcgtgtagtgtttttcttagtccgttacgtaggtaggaatctgatgtaatggttgttggtattttgtcaccattcatttttatctggttgttctcaagttcggttacgagatccatttgtctatctagttcaacttggaaaatcaacgtatcagtcgggcggcctcgcttatcaaccaccaatttcatattgctgtaagtgtttaaatctttacttattggtttcaaaacccattggttaagccttttaaactcatggtagttattttcaagcattaacatgaacttaaattcatcaaggctaatctctatatttgccttgtgagttttcttttgtgttagttcttttaataaccactcataaatcctcatagagtatttgttttcaaaagacttaacatgttccagattatattttatgaatttttttaactggaaaagataaggcaatatctcttcactaaaaactaattctaatttttcgcttgagaacttggcatagtttgtccactggaaaatcttaaagcctttaaccaaaggattcctgatttccacagttctcgtcatcagctctctggttgctttagctaatacaccataagcattttccctactgatgttcatcatctgagcgtattggttataagtgaacgataccgtccgttctttccttgtagggttttcaatcgtggggttgagtagtgccacacagcataaaattagcttggtttcatgctccgttaagtcatagcgactaatcgctagttcatttgctttgaaaacaactaattcagacatacatctcaattggtctaggtgattttaatcactataccaattgagatgggctagtcaatgataattactagtccttttcctttgagttgtgggtatctgtaaattctgctagacctttgctggaaaacttgtaaattctgctagaccctctgtaaattccgctagacctttgtgtgttttttttgtttatattcaagtggttataatttatagaataaagaaagaataaaaaaagataaaaagaatagatcccagccctgtgtataactcactactttagtcagttccgcagtattacaaaaggatgtcgcaaacgctgtttgctcctctacaaaacagaccttaaaaccctaaaggcttaagtagcaccctcgcaagctcgggcaaatcgctgaatattccttttgtctccgaccatcaggcacctgagtcgctgtctttttcgtgacattcagttcgctgcgctcacggctctggcagtgaatgggggtaaatggcactacaggcgccttttatggattcatgcaaggaaactacccataatacaagaaaagcccgtcacgggcttctcagggcgttttatggcgggtctgctatgtggtgctatctgactttttgctgttcagcagttcctgccctctgattttccagtctgaccacttcggattatcccgtgacaggtcattcagactggctaatgcacccagtaaggcagcggtatcatcaacaggcttacccgtcttactgtcaagaggacatccggtcaaataaaacgaaaggctcagtcgaaagactgggcctttcgttttgctgaggagacttagggaccctttatgacaacttgacggctacatcattcactttttcttcacaaccggcacggaactcgctcgggctggccccggtgcattttttaaatacccgcgagaaatagagttgatcgtcaaaaccaacattgcgaccgacggtggcgataggcatccgggtggtgctcaaaagcagcttcgcctggctgatacgttggtcctcgcgccagcttaagacgctaatccctaactgctggcggaaaagatgtgacagacgcgacggcgacaagcaaacatgctgtgcgacgctggcgatatcaaaattgctgtctgccaggtgatcgctgatgtactgacaagcctcgcgtacccgattatccatcggtggatggagcgactcgttaatcgcttccatgcgccgcagtaacaattgctcaagcagatttatcgccagcagctccgaatagcgcccttccccttgcccggcgttaatgatttgcccaaacaggtcgctgaaatgcggctggtgcgcttcatccgggcgaaagaaccccgtattggcaaatattgacggccagttaagccattcatgccagtaggcgcgcggacgaaagtaaacccactggtgataccattcgcgagcctccggatgacgaccgtagtgatgaatctctcctggcgggaacagcaaaatatcacccggtcggcaaacaaattctcgtccctgatttttcaccaccccctgaccgcgaatggtgagattaagaatataacctttcattcccagcggtcggtcgataaaaaaatcgagataaccgttggcctcaatcggcgttaaacccgccaccagatgggcattaaacgagtatcccggcagcaggggatcattttgcgcttcagccatacttttcatactcccaccattcagagaagaaaccaattgtccatattgcatcagacattgccgtcactgcgtcttttactggctcttctcgctaacccaaccggtaaccccgcttattaaaagcattctgtaacaaagcgggaccaaagccatgacaaaaacgcgtaacaaaagtgtctataatcacggcagaaaagtccacattgattatttgcacggcgtcacactttgctatgccatagcatttttatccataagattagcggatcctacctgacgctttttatcgcaactctctactgtttctccatacccgttttacctgcaggtgcagtaagaatgcggagttttagcaatgcctaaaatgaaaactgtaagcggtgccgccaaacgttttaagaaaacgggttctggccgctttaaaagcaaacagtctcacttacgtcacattctgactaagaagagctctaagcgtaaacgtcaccttcgtggcaaaaaactggttcatgactctgataccaaattggttcagcgcatgttgccttacgtataagacttaggagactgattaatggctagagtaaaacgcggcactatcgcacgtgctcgtcacaaaaaagtcctcaagcaggcaaaaggttattacggcgcacgttcacgtgtatatcgcgtagcggtacaagctgtaactaaagctggtcaatatgcttaccgtgaccgtcgtcagcgcaagcgtcaattccgtcaactatggattgcacgtattaacgctgctgctcgtcaaaatggtatgtcatacagccgtttcatcaacggtttgaagaaagcgtctgttgaaatcgatcgtaagatccttgccgacatcgcagtacatgacaaagcagctttcagcgcactagtcgaagcggctaaaggcgcattagcttaattattaaccataataggagcacgaacacatggcacacaaaaaagctggtggtagtaccaaaaacggtcgtgattcagaaagtaaacgcctaggtgttaagcgctttggtggtgaatctgttcttgctggtaacatcattgttcgtcaacgtggtactcgtttccacgctggtgacaacatgggtatcggtaaagaccacacgttgtttgcactaaaagacggtaaagttcagttcgacgttaaaggaccgaagaaccgtaaatttgtaagcatcgtagctgagtaagcgcgtaatatatttttggagacagacaatgtctgaagcaaatttcaaactagacgcttctgttcgtacagacctagggaaaggtgcgagccgccgcctacgtcgcgaagataagcttcctggtatcatctacggtggtgaagaagcaccagtttctatcacactagatcataacaaagtaaacaactctgctgactttgaagcgttttattctcacgttcttgagattaaccttgacggtaaagttgttgaagttctagttaaagatatgcaacgtcacccgttcaagccaaagatcacacacattgacttccaacgtgtaatcgctggtcaagacgttcacactaacgtaccacttcacttcgtaaatgaagagaaatctgctgctgttaaagctggcggtattgctgagcaccacgtaactgaaatcgaagttacttgtctacctaagaaccttcctgagttcatcgaagtagacatggctggtgttgaaatgggtcaaacgctacacctttctgacctaactcttccagctggcgtttcttcagttgaacttgcgaagaacgacgaagctcacgacctagcggttgtaactgttaagcctgctcctaaagcggctgacgcagaagaagacggcgaagaagcagcttctgaggaataatcctgttgttgttctggagacaaatacaatgtcaagagtatgccaagtaacaggtaagcgtccaacggttggtaataaccgttcacacgcaagaaatgcgactcgtcgtcgctttttgccaaaccttcaaacacaccgtttttgggttgagagcgaaaaccgttttgtaaaactacgtttgtctgcaaaaggcatgcgtatcatcgacaagaaaggtattgattcagtactaactgacatccgtacccgtggtgagaaaatctaaggaagccgacaatgcgtgataaaattaaactagtttcttcagcaggtacaggtttcttctacactactgataaaaacaagcgtaacatgcctggcaaaatggagatcaaaaagtatgatcccgttgtgcgtaagcacgttatgttcaaagaggccaaaatcaagtaattagcttgttattatgtgaggtaacccaatgaaacaagatatccacccaaaatacgaagaaatcacagcaacttgctcatgtggtaacgtaatgaacattcgttctacgcttggtaaagacatcaacctagacgtatgttcttcatgtcacccattctacactggtaagcaacgtaacgttgacactggtggtcgtgttgatcgcttcaagaagcgtttcggtgcattgggcaaaaagtaagcctgataagcgagaccaggagtaagttatggcagtacaacaaaatcgtaaaacgcgttctaagcgcggtatgcgtcgctcacacgatgcattgacaggcgcgactttgtctgtcgattcaacgtcgggcgaaactcaccgtcgtcaccacgtgaccgctgacggttattacaaaggcaagaaagtaatcggcgcgtaatacggcgaatataagtgagactttggtcatgaaaagaacatttcaaccgagcaatctaaagcgcaagcgttctcacggttttcgtgctcgtatggcgactaaaaatggtcgtaaagtactagcagctcgccgtgcaaaaggccgcgctcgtctttcagcttaattgaaagaacttaattaacggcactcctcagccaagtcaaaagcctccggtcggaggcttttgactacatgcccatggcgtttacgccccgccctgccactcatcgcagtactgttgtaattcattaagcattctgccgacatggaagccatcacaaacggcatgatgaacctgaatcgccagcggcatcagcaccttgtcgccttgcgtataatatttgcccatagtgaaaacgggggcgaagaagttgtccatattggccacgtttaaatcaaaactggtgaaactcacccagggattggctgagacgaaaaacatattctcaataaaccctttagggaaataggccaggttttcaccgtaacacgccacatcttgcgaatatatgtgtagaaactgccggaaatcgtcgtggtattcactccagagcgatgaaaacgtttcagtttgctcatggaaaacggtgtaacaagggtgaacactatcccatatcaccagctcaccgtctttcattgccatacggaactccggatgagcattcatcaggcgggcaagaatgtgaataaaggccggataaaacttgtgcttatttttctttacggtctttaaaaaggccgtaatatccagctgaacggtctggttataggtacattgagcaactgactgaaatgcctcaaaatgttctttacgatgccattgggatatatcaacggtggtatatccagtgatttttttctccattttagcttccttagctcctgaaaatctcgataactcaaaaaatacgcccggtagtgatcttatttcattatggtgaaagttggaacctcttacgtgccaagccaaataggccgt

SEQ ID NO: 269 - DNA, 6480 bp, Artificial
  Synthetic
tcagatccttccgtatttagccagtatgttctctagtgtggttcgttgtttttgcgtgagccatgagaacgaaccattgagatcatgcttactttgcatgtcactcaaaaattttgcctcaaaactggtgagctgaatttttgcagttaaagcatcgtgtagtgtttttcttagtccgttacgtaggtaggaatctgatgtaatggttgttggtattttgtcaccattcatttttatctggttgttctcaagttcggttacgagatccatttgtctatctagttcaacttggaaaatcaacgtatcagtcgggcggcctcgcttatcaaccaccaatttcatattgctgtaagtgtttaaatctttacttattggtttcaaaacccattggttaagccttttaaactcatggtagttattttcaagcattaacatgaacttaaattcatcaaggctaatctctatatttgccttgtgagttttcttttgtgttagttcttttaataaccactcataaatcctcatagagtatttgttttcaaaagacttaacatgttccagattatattttatgaatttttttaactggaaaagataaggcaatatctcttcactaaaaactaattctaatttttcgcttgagaacttggcatagtttgtccactggaaaatcttaaagcctttaaccaaaggattcctgatttccacagttctcgtcatcagctctctggttgctttagctaatacaccataagcattttccctactgatgttcatcatctgagcgtattggttataagtgaacgataccgtccgttctttccttgtagggttttcaatcgtggggttgagtagtgccacacagcataaaattagcttggtttcatgctccgttaagtcatagcgactaatcgctagttcatttgctttgaaaacaactaattcagacatacatctcaattggtctaggtgattttaatcactataccaattgagatgggctagtcaatgataattactagtccttttcctttgagttgtgggtatctgtaaattctgctagacctttgctggaaaacttgtaaattctgctagaccctctgtaaattccgctagacctttgtgtgttttttttgtttatattcaagtggttataatttatagaataaagaaagaataaaaaaagataaaaagaatagatcccagccctgtgtataactcactactttagtcagttccgcagtattacaaaaggatgtcgcaaacgctgtttgctcctctacaaaacagaccttaaaaccctaaaggcttaagtagcaccctcgcaagctcgggcaaatcgctgaatattccttttgtctccgaccatcaggcacctgagtcgctgtctttttcgtgacattcagttcgctgcgctcacggctctggcagtgaatgggggtaaatggcactacaggcgccttttatggattcatgcaaggaaactacccataatacaagaaaagcccgtcacgggcttctcagggcgttttatggcgggtctgctatgtggtgctatctgactttttgctgttcagcagttcctgccctctgattttccagtctgaccacttcggattatcccgtgacaggtcattcagactggctaatgcacccagtaaggcagcggtatcatcaacaggcttacccgtcttactgtcaagaggacatccggtcaaataaaacgaaaggctcagtcgaaagactgggcctttcgttttgctgaggagacttagggaccctttatgacaacttgacggctacatcattcactttttcttcacaaccggcacggaactcgctcgggctggccccggtgcattttttaaatacccgcgagaaatagagttgatcgtcaaaaccaacattgcgaccgacggtggcgataggcatccgggtggtgctcaaaagcagcttcgcctggctgatacgttggtcctcgcgccagcttaagacgctaatccctaactgctggcggaaaagatgtgacagacgcgacggcgacaagcaaacatgctgtgcgacgctggcgatatcaaaattgctgtctgccaggtgatcgctgatgtactgacaagcctcgcgtacccgattatccatcggtggatggagcgactcgttaatcgcttccatgcgccgcagtaacaattgctcaagcagatttatcgccagcagctccgaatagcgcccttccccttgcccggcgttaatgatttgcccaaacaggtcgctgaaatgcggctggtgcgcttcatccgggcgaaagaaccccgtattggcaaatattgacggccagttaagccattcatgccagtaggcgcgcggacgaaagtaaacccactggtgataccattcgcgagcctccggatgacgaccgtagtgatgaatctctcctggcgggaacagcaaaatatcacccggtcggcaaacaaattctcgtccctgatttttcaccaccccctgaccgcgaatggtgagattaagaatataacctttcattcccagcggtcggtcgataaaaaaatcgagataaccgttggcctcaatcggcgttaaacccgccaccagatgggcattaaacgagtatcccggcagcaggggatcattttgcgcttcagccatacttttcatactcccaccattcagagaagaaaccaattgtccatattgcatcagacattgccgtcactgcgtcttttactggctcttctcgctaacccaaccggtaaccccgcttattaaaagcattctgtaacaaagcgggaccaaagccatgacaaaaacgcgtaacaaaagtgtctataatcacggcagaaaagtccacattgattatttgcacggcgtcacactttgctatgccatagcatttttatccataagattagcggatcctacctgacgctttttatcgcaactctctactgtttctccatacccgttttacctgcaggtgcagtaagaatgcggagttttagcaatgcctaaaatgaaaactgtaagcggtgccgccaaacgttttaagaaaacgggttctggccgctttaaaagcaaacagtctcacttacgtcacattctgactaagaagagctctaagcgtaaacgtcaccttcgtggcaaaaaactggttcatgactctgataccaaattggttcagcgcatgttgccttacgtataagacttaggagactgattaatggctagagtaaaacgcggcactatcgcacgtgctcgtcacaaaaaagtcctcaagcaggcaaaaggttattacggcgcacgttcacgtgtatatcgcgtagcggtacaagctgtaactaaagctggtcaatatgcttaccgtgaccgtcgtcagcgcaagcgtcaattccgtcaactatggattgcacgtattaacgctgctgctcgtcaaaatggtatgtcatacagccgtttcatcaacggtttgaagaaagcgtctgttgaaatcgatcgtaagatccttgccgacatcgcagtacatgacaaagcagctttcagcgcactagtcgaagcggctaaaggcgcattagcttaattattaacgaggcagagcggagttaactatgtacgcggttttccaaagtggcggtaaacaacaccgtgtggccgaaggccaaaccgttcgtcttgaaaaaatcgaagtagccccaggcgaaacggttgaatttgacaaagttttaatggtaagcaacggtgacgacgtaaaaatcggcacaccaatcgttgctggtggtaaggtgactgctgaggttgttacacacggtcgtggcgataaagtaaaaatcgttaagttccgtcgtcgtaagcactctcgtaagcaagcgggtcaccgtcagtggttcacagaagtgaaaatcactggtatcaacgcataataggagcatatatttttggagacagacaatgtctgaagcaaatttcaaactagacgcttctgttcgtacagacctagggaaaggtgcgagccgccgcctacgtcgcgaagataagcttcctggtatcatctacggtggtgaagaagcaccagtttctatcacactagatcataacaaagtaaacaactctgctgactttgaagcgttttattctcacgttcttgagattaaccttgacggtaaagttgttgaagttctagttaaagatatgcaacgtcacccgttcaagccaaagatcacacacattgacttccaacgtgtaatcgctggtcaagacgttcacactaacgtaccacttcacttcgtaaatgaagagaaatctgctgctgttaaagctggcggtattgctgagcaccacgtaactgaaatcgaagttacttgtctacctaagaaccttcctgagttcatcgaagtagacatggctggtgttgaaatgggtcaaacgctacacctttctgacctaactcttccagctggcgtttcttcagttgaacttgcgaagaacgacgaagctcacgacctagcggttgtaactgttaagcctgctcctaaagcggctgacgcagaagaagacggcgaagaagcagcttctgaggaataatcctgttgttgttctggagacaaatacaatgtcaagagtatgccaagtaacaggtaagcgtccaacggttggtaataaccgttcacacgcaagaaatgcgactcgtcgtcgctttttgccaaaccttcaaacacaccgtttttgggttgagagcgaaaaccgttttgtaaaactacgtttgtctgcaaaaggcatgcgtatcatcgacaagaaaggtattgattcagtactaactgacatccgtacccgtggtgagaaaatctaaggaagccgacaatgcgtgataaaattaaactagtttcttcagcaggtacaggtttcttctacactactgataaaaacaagcgtaacatgcctggcaaaatggagatcaaaaagtatgatcccgttgtgcgtaagcacgttatgttcaaagaggccaaaatcaagtaattagcttgttattatgtgaggtaacccaatgaaacaagatatccacccaaaatacgaagaaatcacagcaacttgctcatgtggtaacgtaatgaacattcgttctacgcttggtaaagacatcaacctagacgtatgttcttcatgtcacccattctacactggtaagcaacgtaacgttgacactggtggtcgtgttgatcgcttcaagaagcgtttcggtgcattgggcaaaaagtaagcctgataagcgagaccaggagtaagttatggcagtacaacaaaatcgtaaaacgcgttctaagcgcggtatgcgtcgctcacacgatgcattgacaggcgcgactttgtctgtcgattcaacgtcgggcgaaactcaccgtcgtcaccacgtgaccgctgacggttattacaaaggcaagaaagtaatcggcgcgtaatacggcgaatataagtgagactttggtcatgaaaagaacatttcaaccgagcaatctaaagcgcaagcgttctcacggttttcgtgctcgtatggcgactaaaaatggtcgtaaagtactagcagctcgccgtgcaaaaggccgcgctcgtctttcagcttaattgaaagaacttaattaacggcactcctcagccaagtcaaaagcctccggtcggaggcttttgactacatgcccatggcgtttacgccccgccctgccactcatcgcagtactgttgtaattcattaagcattctgccgacatggaagccatcacaaacggcatgatgaacctgaatcgccagcggcatcagcaccttgtcgccttgcgtataatatttgcccatagtgaaaacgggggcgaagaagttgtccatattggccacgtttaaatcaaaactggtgaaactcacccagggattggctgagacgaaaaacatattctcaataaaccctttagggaaataggccaggttttcaccgtaacacgccacatcttgcgaatatatgtgtagaaactgccggaaatcgtcgtggtattcactccagagcgatgaaaacgtttcagtttgctcatggaaaacggtgtaacaagggtgaacactatcccatatcaccagctcaccgtctttcattgccatacggaactccggatgagcattcatcaggcgggcaagaatgtgaataaaggccggataaaacttgtgcttatttttctttacggtctttaaaaaggccgtaatatccagctgaacggtctggttataggtacattgagcaactgactgaaatgcctcaaaatgttctttacgatgccattgggatatatcaacggtggtatatccagtgatttttttctccattttagcttccttagctcctgaaaatctcgataactcaaaaaatacgcccggtagtgatcttatttcattatggtgaaagttggaacctcttacgtgccaagccaaataggccgt

SEQ ID NO: 270 - DNA, 6092 bp, Artificial
  Synthetic
tcagatccttccgtatttagccagtatgttctctagtgtggttcgttgtttttgcgtgagccatgagaacgaaccattgagatcatgcttactttgcatgtcactcaaaaattttgcctcaaaactggtgagctgaatttttgcagttaaagcatcgtgtagtgtttttcttagtccgttacgtaggtaggaatctgatgtaatggttgttggtattttgtcaccattcatttttatctggttgttctcaagttcggttacgagatccatttgtctatctagttcaacttggaaaatcaacgtatcagtcgggcggcctcgcttatcaaccaccaatttcatattgctgtaagtgtttaaatctttacttattggtttcaaaacccattggttaagccttttaaactcatggtagttattttcaagcattaacatgaacttaaattcatcaaggctaatctctatatttgccttgtgagttttcttttgtgttagttcttttaataaccactcataaatcctcatagagtatttgttttcaaaagacttaacatgttccagattatattttatgaatttttttaactggaaaagataaggcaatatctcttcactaaaaactaattctaatttttcgcttgagaacttggcatagtttgtccactggaaaatcttaaagcctttaaccaaaggattcctgatttccacagttctcgtcatcagctctctggttgctttagctaatacaccataagcattttccctactgatgttcatcatctgagcgtattggttataagtgaacgataccgtccgttctttccttgtagggttttcaatcgtggggttgagtagtgccacacagcataaaattagcttggtttcatgctccgttaagtcatagcgactaatcgctagttcatttgctttgaaaacaactaattcagacatacatctcaattggtctaggtgattttaatcactataccaattgagatgggctagtcaatgataattactagtccttttcctttgagttgtgggtatctgtaaattctgctagacctttgctggaaaacttgtaaattctgctagaccctctgtaaattccgctagacctttgtgtgttttttttgtttatattcaagtggttataatttatagaataaagaaagaataaaaaaagataaaaagaatagatcccagccctgtgtataactcactactttagtcagttccgcagtattacaaaaggatgtcgcaaacgctgtttgctcctctacaaaacagaccttaaaaccctaaaggcttaagtagcaccctcgcaagctcgggcaaatcgctgaatattccttttgtctccgaccatcaggcacctgagtcgctgtctttttcgtgacattcagttcgctgcgctcacggctctggcagtgaatgggggtaaatggcactacaggcgccttttatggattcatgcaaggaaactacccataatacaagaaaagcccgtcacgggcttctcagggcgttttatggcgggtctgctatgtggtgctatctgactttttgctgttcagcagttcctgccctctgattttccagtctgaccacttcggattatcccgtgacaggtcattcagactggctaatgcacccagtaaggcagcggtatcatcaacaggcttacccgtcttactgtcaagaggacatccggtcaaataaaacgaaaggctcagtcgaaagactgggcctttcgttttgctgaggagacttagggaccctttatgacaacttgacggctacatcattcactttttcttcacaaccggcacggaactcgctcgggctggccccggtgcattttttaaatacccgcgagaaatagagttgatcgtcaaaaccaacattgcgaccgacggtggcgataggcatccgggtggtgctcaaaagcagcttcgcctggctgatacgttggtcctcgcgccagcttaagacgctaatccctaactgctggcggaaaagatgtgacagacgcgacggcgacaagcaaacatgctgtgcgacgctggcgatatcaaaattgctgtctgccaggtgatcgctgatgtactgacaagcctcgcgtacccgattatccatcggtggatggagcgactcgttaatcgcttccatgcgccgcagtaacaattgctcaagcagatttatcgccagcagctccgaatagcgcccttccccttgcccggcgttaatgatttgcccaaacaggtcgctgaaatgcggctggtgcgcttcatccgggcgaaagaaccccgtattggcaaatattgacggccagttaagccattcatgccagtaggcgcgcggacgaaagtaaacccactggtgataccattcgcgagcctccggatgacgaccgtagtgatgaatctctcctggcgggaacagcaaaatatcacccggtcggcaaacaaattctcgtccctgatttttcaccaccccctgaccgcgaatggtgagattaagaatataacctttcattcccagcggtcggtcgataaaaaaatcgagataaccgttggcctcaatcggcgttaaacccgccaccagatgggcattaaacgagtatcccggcagcaggggatcattttgcgcttcagccatacttttcatactcccaccattcagagaagaaaccaattgtccatattgcatcagacattgccgtcactgcgtcttttactggctcttctcgctaacccaaccggtaaccccgcttattaaaagcattctgtaacaaagcgggaccaaagccatgacaaaaacgcgtaacaaaagtgtctataatcacggcagaaaagtccacattgattatttgcacggcgtcacactttgctatgccatagcatttttatccataagattagcggatcctacctgacgctttttatcgcaactctctactgtttctccatacccgttttacctgcaggtgcagtaagaatgcggagttttagcaatgcctaaaatgaaaactgtaagcggtgccgccaaacgttttaagaaaacgggttctggccgctttaaaagcaaacagtctcacttacgtcacattctgactaagaagagctctaagcgtaaacgtcaccttcgtggcaaaaaactggttcatgactctgataccaaattggttcagcgcatgttgccttacgtataagacttaggagactgattaatggctagagtaaaacgcggcactatcgcacgtgctcgtcacaaaaaagtcctcaagcaggcaaaaggttattacggcgcacgttcacgtgtatatcgcgtagcggtacaagctgtaactaaagctggtcaatatgcttaccgtgaccgtcgtcagcgcaagcgtcaattccgtcaactatggattgcacgtattaacgctgctgctcgtcaaaatggtatgtcatacagccgtttcatcaacggtttgaagaaagcgtctgttgaaatcgatcgtaagatccttgccgacatcgcagtacatgacaaagcagctttcagcgcactagtcgaagcggctaaaggcgcattagcttaattattaacgaggcagagcggagttaactatgtacgcggttttccaaagtggcggtaaacaacaccgtgtggccgaaggccaaaccgttcgtcttgaaaaaatcgaagtagccccaggcgaaacggttgaatttgacaaagttttaatggtaagcaacggtgacgacgtaaaaatcggcacaccaatcgttgctggtggtaaggtgactgctgaggttgttacacacggtcgtggcgataaagtaaaaatcgttaagttccgtcgtcgtaagcactctcgtaagcaagcgggtcaccgtcagtggttcacagaagtgaaaatcactggtatcaacgcataataggagcacgaacacatggcacacaaaaaagctggtggtagtaccaaaaacggtcgtgattcagaaagtaaacgcctaggtgttaagcgctttggtggtgaatctgttcttgctggtaacatcattgttcgtcaacgtggtactcgtttccacgctggtgacaacatgggtatcggtaaagaccacacgttgtttgcactaaaagacggtaaagttcagttcgacgttaaaggaccgaagaaccgtaaatttgtaagcatcgtagctgagtaagcgcgtaattgttctggagacaaatacaatgtcaagagtatgccaagtaacaggtaagcgtccaacggttggtaataaccgttcacacgcaagaaatgcgactcgtcgtcgctttttgccaaaccttcaaacacaccgtttttgggttgagagcgaaaaccgttttgtaaaactacgtttgtctgcaaaaggcatgcgtatcatcgacaagaaaggtattgattcagtactaactgacatccgtacccgtggtgagaaaatctaaggaagccgacaatgcgtgataaaattaaactagtttcttcagcaggtacaggtttcttctacactactgataaaaacaagcgtaacatgcctggcaaaatggagatcaaaaagtatgatcccgttgtgcgtaagcacgttatgttcaaagaggccaaaatcaagtaattagcttgttattatgtgaggtaacccaatgaaacaagatatccacccaaaatacgaagaaatcacagcaacttgctcatgtggtaacgtaatgaacattcgttctacgcttggtaaagacatcaacctagacgtatgttcttcatgtcacccattctacactggtaagcaacgtaacgttgacactggtggtcgtgttgatcgcttcaagaagcgtttcggtgcattgggcaaaaagtaagcctgataagcgagaccaggagtaagttatggcagtacaacaaaatcgtaaaacgcgttctaagcgcggtatgcgtcgctcacacgatgcattgacaggcgcgactttgtctgtcgattcaacgtcgggcgaaactcaccgtcgtcaccacgtgaccgctgacggttattacaaaggcaagaaagtaatcggcgcgtaatacggcgaatataagtgagactttggtcatgaaaagaacatttcaaccgagcaatctaaagcgcaagcgttctcacggttttcgtgctcgtatggcgactaaaaatggtcgtaaagtactagcagctcgccgtgcaaaaggccgcgctcgtctttcagcttaattgaaagaacttaattaacggcactcctcagccaagtcaaaagcctccggtcggaggcttttgactacatgcccatggcgtttacgccccgccctgccactcatcgcagtactgttgtaattcattaagcattctgccgacatggaagccatcacaaacggcatgatgaacctgaatcgccagcggcatcagcaccttgtcgccttgcgtataatatttgcccatagtgaaaacgggggcgaagaagttgtccatattggccacgtttaaatcaaaactggtgaaactcacccagggattggctgagacgaaaaacatattctcaataaaccctttagggaaataggccaggttttcaccgtaacacgccacatcttgcgaatatatgtgtagaaactgccggaaatcgtcgtggtattcactccagagcgatgaaaacgtttcagtttgctcatggaaaacggtgtaacaagggtgaacactatcccatatcaccagctcaccgtctttcattgccatacggaactccggatgagcattcatcaggcgggcaagaatgtgaataaaggccggataaaacttgtgcttatttttctttacggtctttaaaaaggccgtaatatccagctgaacggtctggttataggtacattgagcaactgactgaaatgcctcaaaatgttctttacgatgccattgggatatatcaacggtggtatatccagtgatttttttctccattttagcttccttagctcctgaaaatctcgataactcaaaaaatacgcccggtagtgatcttatttcattatggtgaaagttggaacctcttacgtgccaagccaaataggccgt

SEQ ID NO: 271 - DNA, 6505 bp, Artificial
  Synthetic
tcagatccttccgtatttagccagtatgttctctagtgtggttcgttgtttttgcgtgagccatgagaacgaaccattgagatcatgcttactttgcatgtcactcaaaaattttgcctcaaaactggtgagctgaatttttgcagttaaagcatcgtgtagtgtttttcttagtccgttacgtaggtaggaatctgatgtaatggttgttggtattttgtcaccattcatttttatctggttgttctcaagttcggttacgagatccatttgtctatctagttcaacttggaaaatcaacgtatcagtcgggcggcctcgcttatcaaccaccaatttcatattgctgtaagtgtttaaatctttacttattggtttcaaaacccattggttaagccttttaaactcatggtagttattttcaagcattaacatgaacttaaattcatcaaggctaatctctatatttgccttgtgagttttcttttgtgttagttcttttaataaccactcataaatcctcatagagtatttgttttcaaaagacttaacatgttccagattatattttatgaatttttttaactggaaaagataaggcaatatctcttcactaaaaactaattctaatttttcgcttgagaacttggcatagtttgtccactggaaaatcttaaagcctttaaccaaaggattcctgatttccacagttctcgtcatcagctctctggttgctttagctaatacaccataagcattttccctactgatgttcatcatctgagcgtattggttataagtgaacgataccgtccgttctttccttgtagggttttcaatcgtggggttgagtagtgccacacagcataaaattagcttggtttcatgctccgttaagtcatagcgactaatcgctagttcatttgctttgaaaacaactaattcagacatacatctcaattggtctaggtgattttaatcactataccaattgagatgggctagtcaatgataattactagtccttttcctttgagttgtgggtatctgtaaattctgctagacctttgctggaaaacttgtaaattctgctagaccctctgtaaattccgctagacctttgtgtgttttttttgtttatattcaagtggttataatttatagaataaagaaagaataaaaaaagataaaaagaatagatcccagccctgtgtataactcactactttagtcagttccgcagtattacaaaaggatgtcgcaaacgctgtttgctcctctacaaaacagaccttaaaaccctaaaggcttaagtagcaccctcgcaagctcgggcaaatcgctgaatattccttttgtctccgaccatcaggcacctgagtcgctgtctttttcgtgacattcagttcgctgcgctcacggctctggcagtgaatgggggtaaatggcactacaggcgccttttatggattcatgcaaggaaactacccataatacaagaaaagcccgtcacgggcttctcagggcgttttatggcgggtctgctatgtggtgctatctgactttttgctgttcagcagttcctgccctctgattttccagtctgaccacttcggattatcccgtgacaggtcattcagactggctaatgcacccagtaaggcagcggtatcatcaacaggcttacccgtcttactgtcaagaggacatccggtcaaataaaacgaaaggctcagtcgaaagactgggcctttcgttttgctgaggagacttagggaccctttatgacaacttgacggctacatcattcactttttcttcacaaccggcacggaactcgctcgggctggccccggtgcattttttaaatacccgcgagaaatagagttgatcgtcaaaaccaacattgcgaccgacggtggcgataggcatccgggtggtgctcaaaagcagcttcgcctggctgatacgttggtcctcgcgccagcttaagacgctaatccctaactgctggcggaaaagatgtgacagacgcgacggcgacaagcaaacatgctgtgcgacgctggcgatatcaaaattgctgtctgccaggtgatcgctgatgtactgacaagcctcgcgtacccgattatccatcggtggatggagcgactcgttaatcgcttccatgcgccgcagtaacaattgctcaagcagatttatcgccagcagctccgaatagcgcccttccccttgcccggcgttaatgatttgcccaaacaggtcgctgaaatgcggctggtgcgcttcatccgggcgaaagaaccccgtattggcaaatattgacggccagttaagccattcatgccagtaggcgcgcggacgaaagtaaacccactggtgataccattcgcgagcctccggatgacgaccgtagtgatgaatctctcctggcgggaacagcaaaatatcacccggtcggcaaacaaattctcgtccctgatttttcaccaccccctgaccgcgaatggtgagattaagaatataacctttcattcccagcggtcggtcgataaaaaaatcgagataaccgttggcctcaatcggcgttaaacccgccaccagatgggcattaaacgagtatcccggcagcaggggatcattttgcgcttcagccatacttttcatactcccaccattcagagaagaaaccaattgtccatattgcatcagacattgccgtcactgcgtcttttactggctcttctcgctaacccaaccggtaaccccgcttattaaaagcattctgtaacaaagcgggaccaaagccatgacaaaaacgcgtaacaaaagtgtctataatcacggcagaaaagtccacattgattatttgcacggcgtcacactttgctatgccatagcatttttatccataagattagcggatcctacctgacgctttttatcgcaactctctactgtttctccatacccgttttacctgcaggtgcagtaagaatgcggagttttagcaatgcctaaaatgaaaactgtaagcggtgccgccaaacgttttaagaaaacgggttctggccgctttaaaagcaaacagtctcacttacgtcacattctgactaagaagagctctaagcgtaaacgtcaccttcgtggcaaaaaactggttcatgactctgataccaaattggttcagcgcatgttgccttacgtataagacttaggagactgattaatggctagagtaaaacgcggcactatcgcacgtgctcgtcacaaaaaagtcctcaagcaggcaaaaggttattacggcgcacgttcacgtgtatatcgcgtagcggtacaagctgtaactaaagctggtcaatatgcttaccgtgaccgtcgtcagcgcaagcgtcaattccgtcaactatggattgcacgtattaacgctgctgctcgtcaaaatggtatgtcatacagccgtttcatcaacggtttgaagaaagcgtctgttgaaatcgatcgtaagatccttgccgacatcgcagtacatgacaaagcagctttcagcgcactagtcgaagcggctaaaggcgcattagcttaattattaacgaggcagagcggagttaactatgtacgcggttttccaaagtggcggtaaacaacaccgtgtggccgaaggccaaaccgttcgtcttgaaaaaatcgaagtagccccaggcgaaacggttgaatttgacaaagttttaatggtaagcaacggtgacgacgtaaaaatcggcacaccaatcgttgctggtggtaaggtgactgctgaggttgttacacacggtcgtggcgataaagtaaaaatcgttaagttccgtcgtcgtaagcactctcgtaagcaagcgggtcaccgtcagtggttcacagaagtgaaaatcactggtatcaacgcataataggagcacgaacacatggcacacaaaaaagctggtggtagtaccaaaaacggtcgtgattcagaaagtaaacgcctaggtgttaagcgctttggtggtgaatctgttcttgctggtaacatcattgttcgtcaacgtggtactcgtttccacgctggtgacaacatgggtatcggtaaagaccacacgttgtttgcactaaaagacggtaaagttcagttcgacgttaaaggaccgaagaaccgtaaatttgtaagcatcgtagctgagtaagcgcgtaatatatttttggagacagacaatgtctgaagcaaatttcaaactagacgcttctgttcgtacagacctagggaaaggtgcgagccgccgcctacgtcgcgaagataagcttcctggtatcatctacggtggtgaagaagcaccagtttctatcacactagatcataacaaagtaaacaactctgctgactttgaagcgttttattctcacgttcttgagattaaccttgacggtaaagttgttgaagttctagttaaagatatgcaacgtcacccgttcaagccaaagatcacacacattgacttccaacgtgtaatcgctggtcaagacgttcacactaacgtaccacttcacttcgtaaatgaagagaaatctgctgctgttaaagctggcggtattgctgagcaccacgtaactgaaatcgaagttacttgtctacctaagaaccttcctgagttcatcgaagtagacatggctggtgttgaaatgggtcaaacgctacacctttctgacctaactcttccagctggcgtttcttcagttgaacttgcgaagaacgacgaagctcacgacctagcggttgtaactgttaagcctgctcctaaagcggctgacgcagaagaagacggcgaagaagcagcttctgaggaataatcctgttgaaaatctaaggaagccgacaatgcgtgataaaattaaactagtttcttcagcaggtacaggtttcttctacactactgataaaaacaagcgtaacatgcctggcaaaatggagatcaaaaagtatgatcccgttgtgcgtaagcacgttatgttcaaagaggccaaaatcaagtaattagcttgttattatgtgaggtaacccaatgaaacaagatatccacccaaaatacgaagaaatcacagcaacttgctcatgtggtaacgtaatgaacattcgttctacgcttggtaaagacatcaacctagacgtatgttcttcatgtcacccattctacactggtaagcaacgtaacgttgacactggtggtcgtgttgatcgcttcaagaagcgtttcggtgcattgggcaaaaagtaagcctgataagcgagaccaggagtaagttatggcagtacaacaaaatcgtaaaacgcgttctaagcgcggtatgcgtcgctcacacgatgcattgacaggcgcgactttgtctgtcgattcaacgtcgggcgaaactcaccgtcgtcaccacgtgaccgctgacggttattacaaaggcaagaaagtaatcggcgcgtaatacggcgaatataagtgagactttggtcatgaaaagaacatttcaaccgagcaatctaaagcgcaagcgttctcacggttttcgtgctcgtatggcgactaaaaatggtcgtaaagtactagcagctcgccgtgcaaaaggccgcgctcgtctttcagcttaattgaaagaacttaattaacggcactcctcagccaagtcaaaagcctccggtcggaggcttttgactacatgcccatggcgtttacgccccgccctgccactcatcgcagtactgttgtaattcattaagcattctgccgacatggaagccatcacaaacggcatgatgaacctgaatcgccagcggcatcagcaccttgtcgccttgcgtataatatttgcccatagtgaaaacgggggcgaagaagttgtccatattggccacgtttaaatcaaaactggtgaaactcacccagggattggctgagacgaaaaacatattctcaataaaccctttagggaaataggccaggttttcaccgtaacacgccacatcttgcgaatatatgtgtagaaactgccggaaatcgtcgtggtattcactccagagcgatgaaaacgtttcagtttgctcatggaaaacggtgtaacaagggtgaacactatcccatatcaccagctcaccgtctttcattgccatacggaactccggatgagcattcatcaggcgggcaagaatgtgaataaaggccggataaaacttgtgcttatttttctttacggtctttaaaaaggccgtaatatccagctgaacggtctggttataggtacattgagcaactgactgaaatgcctcaaaatgttctttacgatgccattgggatatatcaacggtggtatatccagtgatttttttctccattttagcttccttagctcctgaaaatctcgataactcaaaaaatacgcccggtagtgatcttatttcattatggtgaaagttggaacctcttacgtgccaagccaaataggccgt

SEQ ID NO: 272 - DNA, 6586 bp, Artificial
  Synthetic
tcagatccttccgtatttagccagtatgttctctagtgtggttcgttgtttttgcgtgagccatgagaacgaaccattgagatcatgcttactttgcatgtcactcaaaaattttgcctcaaaactggtgagctgaatttttgcagttaaagcatcgtgtagtgtttttcttagtccgttacgtaggtaggaatctgatgtaatggttgttggtattttgtcaccattcatttttatctggttgttctcaagttcggttacgagatccatttgtctatctagttcaacttggaaaatcaacgtatcagtcgggcggcctcgcttatcaaccaccaatttcatattgctgtaagtgtttaaatctttacttattggtttcaaaacccattggttaagccttttaaactcatggtagttattttcaagcattaacatgaacttaaattcatcaaggctaatctctatatttgccttgtgagttttcttttgtgttagttcttttaataaccactcataaatcctcatagagtatttgttttcaaaagacttaacatgttccagattatattttatgaatttttttaactggaaaagataaggcaatatctcttcactaaaaactaattctaatttttcgcttgagaacttggcatagtttgtccactggaaaatcttaaagcctttaaccaaaggattcctgatttccacagttctcgtcatcagctctctggttgctttagctaatacaccataagcattttccctactgatgttcatcatctgagcgtattggttataagtgaacgataccgtccgttctttccttgtagggttttcaatcgtggggttgagtagtgccacacagcataaaattagcttggtttcatgctccgttaagtcatagcgactaatcgctagttcatttgctttgaaaacaactaattcagacatacatctcaattggtctaggtgattttaatcactataccaattgagatgggctagtcaatgataattactagtccttttcctttgagttgtgggtatctgtaaattctgctagacctttgctggaaaacttgtaaattctgctagaccctctgtaaattccgctagacctttgtgtgttttttttgtttatattcaagtggttataatttatagaataaagaaagaataaaaaaagataaaaagaatagatcccagccctgtgtataactcactactttagtcagttccgcagtattacaaaaggatgtcgcaaacgctgtttgctcctctacaaaacagaccttaaaaccctaaaggcttaagtagcaccctcgcaagctcgggcaaatcgctgaatattccttttgtctccgaccatcaggcacctgagtcgctgtctttttcgtgacattcagttcgctgcgctcacggctctggcagtgaatgggggtaaatggcactacaggcgccttttatggattcatgcaaggaaactacccataatacaagaaaagcccgtcacgggcttctcagggcgttttatggcgggtctgctatgtggtgctatctgactttttgctgttcagcagttcctgccctctgattttccagtctgaccacttcggattatcccgtgacaggtcattcagactggctaatgcacccagtaaggcagcggtatcatcaacaggcttacccgtcttactgtcaagaggacatccggtcaaataaaacgaaaggctcagtcgaaagactgggcctttcgttttgctgaggagacttagggaccctttatgacaacttgacggctacatcattcactttttcttcacaaccggcacggaactcgctcgggctggccccggtgcattttttaaatacccgcgagaaatagagttgatcgtcaaaaccaacattgcgaccgacggtggcgataggcatccgggtggtgctcaaaagcagcttcgcctggctgatacgttggtcctcgcgccagcttaagacgctaatccctaactgctggcggaaaagatgtgacagacgcgacggcgacaagcaaacatgctgtgcgacgctggcgatatcaaaattgctgtctgccaggtgatcgctgatgtactgacaagcctcgcgtacccgattatccatcggtggatggagcgactcgttaatcgcttccatgcgccgcagtaacaattgctcaagcagatttatcgccagcagctccgaatagcgcccttccccttgcccggcgttaatgatttgcccaaacaggtcgctgaaatgcggctggtgcgcttcatccgggcgaaagaaccccgtattggcaaatattgacggccagttaagccattcatgccagtaggcgcgcggacgaaagtaaacccactggtgataccattcgcgagcctccggatgacgaccgtagtgatgaatctctcctggcgggaacagcaaaatatcacccggtcggcaaacaaattctcgtccctgatttttcaccaccccctgaccgcgaatggtgagattaagaatataacctttcattcccagcggtcggtcgataaaaaaatcgagataaccgttggcctcaatcggcgttaaacccgccaccagatgggcattaaacgagtatcccggcagcaggggatcattttgcgcttcagccatacttttcatactcccaccattcagagaagaaaccaattgtccatattgcatcagacattgccgtcactgcgtcttttactggctcttctcgctaacccaaccggtaaccccgcttattaaaagcattctgtaacaaagcgggaccaaagccatgacaaaaacgcgtaacaaaagtgtctataatcacggcagaaaagtccacattgattatttgcacggcgtcacactttgctatgccatagcatttttatccataagattagcggatcctacctgacgctttttatcgcaactctctactgtttctccatacccgttttacctgcaggtgcagtaagaatgcggagttttagcaatgcctaaaatgaaaactgtaagcggtgccgccaaacgttttaagaaaacgggttctggccgctttaaaagcaaacagtctcacttacgtcacattctgactaagaagagctctaagcgtaaacgtcaccttcgtggcaaaaaactggttcatgactctgataccaaattggttcagcgcatgttgccttacgtataagacttaggagactgattaatggctagagtaaaacgcggcactatcgcacgtgctcgtcacaaaaaagtcctcaagcaggcaaaaggttattacggcgcacgttcacgtgtatatcgcgtagcggtacaagctgtaactaaagctggtcaatatgcttaccgtgaccgtcgtcagcgcaagcgtcaattccgtcaactatggattgcacgtattaacgctgctgctcgtcaaaatggtatgtcatacagccgtttcatcaacggtttgaagaaagcgtctgttgaaatcgatcgtaagatccttgccgacatcgcagtacatgacaaagcagctttcagcgcactagtcgaagcggctaaaggcgcattagcttaattattaacgaggcagagcggagttaactatgtacgcggttttccaaagtggcggtaaacaacaccgtgtggccgaaggccaaaccgttcgtcttgaaaaaatcgaagtagccccaggcgaaacggttgaatttgacaaagttttaatggtaagcaacggtgacgacgtaaaaatcggcacaccaatcgttgctggtggtaaggtgactgctgaggttgttacacacggtcgtggcgataaagtaaaaatcgttaagttccgtcgtcgtaagcactctcgtaagcaagcgggtcaccgtcagtggttcacagaagtgaaaatcactggtatcaacgcataataggagcacgaacacatggcacacaaaaaagctggtggtagtaccaaaaacggtcgtgattcagaaagtaaacgcctaggtgttaagcgctttggtggtgaatctgttcttgctggtaacatcattgttcgtcaacgtggtactcgtttccacgctggtgacaacatgggtatcggtaaagaccacacgttgtttgcactaaaagacggtaaagttcagttcgacgttaaaggaccgaagaaccgtaaatttgtaagcatcgtagctgagtaagcgcgtaatatatttttggagacagacaatgtctgaagcaaatttcaaactagacgcttctgttcgtacagacctagggaaaggtgcgagccgccgcctacgtcgcgaagataagcttcctggtatcatctacggtggtgaagaagcaccagtttctatcacactagatcataacaaagtaaacaactctgctgactttgaagcgttttattctcacgttcttgagattaaccttgacggtaaagttgttgaagttctagttaaagatatgcaacgtcacccgttcaagccaaagatcacacacattgacttccaacgtgtaatcgctggtcaagacgttcacactaacgtaccacttcacttcgtaaatgaagagaaatctgctgctgttaaagctggcggtattgctgagcaccacgtaactgaaatcgaagttacttgtctacctaagaaccttcctgagttcatcgaagtagacatggctggtgttgaaatgggtcaaacgctacacctttctgacctaactcttccagctggcgtttcttcagttgaacttgcgaagaacgacgaagctcacgacctagcggttgtaactgttaagcctgctcctaaagcggctgacgcagaagaagacggcgaagaagcagcttctgaggaataatcctgttgttgttctggagacaaatacaatgtcaagagtatgccaagtaacaggtaagcgtccaacggttggtaataaccgttcacacgcaagaaatgcgactcgtcgtcgctttttgccaaaccttcaaacacaccgtttttgggttgagagcgaaaaccgttttgtaaaactacgtttgtctgcaaaaggcatgcgtatcatcgacaagaaaggtattgattcagtactaactgacatccgtacccgtggtgagaaaatctaaggaagccgttattatgtgaggtaacccaatgaaacaagatatccacccaaaatacgaagaaatcacagcaacttgctcatgtggtaacgtaatgaacattcgttctacgcttggtaaagacatcaacctagacgtatgttcttcatgtcacccattctacactggtaagcaacgtaacgttgacactggtggtcgtgttgatcgcttcaagaagcgtttcggtgcattgggcaaaaagtaagcctgataagcgagaccaggagtaagttatggcagtacaacaaaatcgtaaaacgcgttctaagcgcggtatgcgtcgctcacacgatgcattgacaggcgcgactttgtctgtcgattcaacgtcgggcgaaactcaccgtcgtcaccacgtgaccgctgacggttattacaaaggcaagaaagtaatcggcgcgtaatacggcgaatataagtgagactttggtcatgaaaagaacatttcaaccgagcaatctaaagcgcaagcgttctcacggttttcgtgctcgtatggcgactaaaaatggtcgtaaagtactagcagctcgccgtgcaaaaggccgcgctcgtctttcagcttaattgaaagaacttaattaacggcactcctcagccaagtcaaaagcctccggtcggaggcttttgactacatgcccatggcgtttacgccccgccctgccactcatcgcagtactgttgtaattcattaagcattctgccgacatggaagccatcacaaacggcatgatgaacctgaatcgccagcggcatcagcaccttgtcgccttgcgtataatatttgcccatagtgaaaacgggggcgaagaagttgtccatattggccacgtttaaatcaaaactggtgaaactcacccagggattggctgagacgaaaaacatattctcaataaaccctttagggaaataggccaggttttcaccgtaacacgccacatcttgcgaatatatgtgtagaaactgccggaaatcgtcgtggtattcactccagagcgatgaaaacgtttcagtttgctcatggaaaacggtgtaacaagggtgaacactatcccatatcaccagctcaccgtctttcattgccatacggaactccggatgagcattcatcaggcgggcaagaatgtgaataaaggccggataaaacttgtgcttatttttctttacggtctttaaaaaggccgtaatatccagctgaacggtctggttataggtacattgagcaactgactgaaatgcctcaaaatgttctttacgatgccattgggatatatcaacggtggtatatccagtgatttttttctccattttagcttccttagctcctgaaaatctcgataactcaaaaaatacgcccggtagtgatcttatttcattatggtgaaagttggaacctcttacgtgccaagccaaataggccgt

SEQ ID NO: 273 - DNA, 6512 bp, Artificial
  Synthetic
tcagatccttccgtatttagccagtatgttctctagtgtggttcgttgtttttgcgtgagccatgagaacgaaccattgagatcatgcttactttgcatgtcactcaaaaattttgcctcaaaactggtgagctgaatttttgcagttaaagcatcgtgtagtgtttttcttagtccgttacgtaggtaggaatctgatgtaatggttgttggtattttgtcaccattcatttttatctggttgttctcaagttcggttacgagatccatttgtctatctagttcaacttggaaaatcaacgtatcagtcgggcggcctcgcttatcaaccaccaatttcatattgctgtaagtgtttaaatctttacttattggtttcaaaacccattggttaagccttttaaactcatggtagttattttcaagcattaacatgaacttaaattcatcaaggctaatctctatatttgccttgtgagttttcttttgtgttagttcttttaataaccactcataaatcctcatagagtatttgttttcaaaagacttaacatgttccagattatattttatgaatttttttaactggaaaagataaggcaatatctcttcactaaaaactaattctaatttttcgcttgagaacttggcatagtttgtccactggaaaatcttaaagcctttaaccaaaggattcctgatttccacagttctcgtcatcagctctctggttgctttagctaatacaccataagcattttccctactgatgttcatcatctgagcgtattggttataagtgaacgataccgtccgttctttccttgtagggttttcaatcgtggggttgagtagtgccacacagcataaaattagcttggtttcatgctccgttaagtcatagcgactaatcgctagttcatttgctttgaaaacaactaattcagacatacatctcaattggtctaggtgattttaatcactataccaattgagatgggctagtcaatgataattactagtccttttcctttgagttgtgggtatctgtaaattctgctagacctttgctggaaaacttgtaaattctgctagaccctctgtaaattccgctagacctttgtgtgttttttttgtttatattcaagtggttataatttatagaataaagaaagaataaaaaaagataaaaagaatagatcccagccctgtgtataactcactactttagtcagttccgcagtattacaaaaggatgtcgcaaacgctgtttgctcctctacaaaacagaccttaaaaccctaaaggcttaagtagcaccctcgcaagctcgggcaaatcgctgaatattccttttgtctccgaccatcaggcacctgagtcgctgtctttttcgtgacattcagttcgctgcgctcacggctctggcagtgaatgggggtaaatggcactacaggcgccttttatggattcatgcaaggaaactacccataatacaagaaaagcccgtcacgggcttctcagggcgttttatggcgggtctgctatgtggtgctatctgactttttgctgttcagcagttcctgccctctgattttccagtctgaccacttcggattatcccgtgacaggtcattcagactggctaatgcacccagtaaggcagcggtatcatcaacaggcttacccgtcttactgtcaagaggacatccggtcaaataaaacgaaaggctcagtcgaaagactgggcctttcgttttgctgaggagacttagggaccctttatgacaacttgacggctacatcattcactttttcttcacaaccggcacggaactcgctcgggctggccccggtgcattttttaaatacccgcgagaaatagagttgatcgtcaaaaccaacattgcgaccgacggtggcgataggcatccgggtggtgctcaaaagcagcttcgcctggctgatacgttggtcctcgcgccagcttaagacgctaatccctaactgctggcggaaaagatgtgacagacgcgacggcgacaagcaaacatgctgtgcgacgctggcgatatcaaaattgctgtctgccaggtgatcgctgatgtactgacaagcctcgcgtacccgattatccatcggtggatggagcgactcgttaatcgcttccatgcgccgcagtaacaattgctcaagcagatttatcgccagcagctccgaatagcgcccttccccttgcccggcgttaatgatttgcccaaacaggtcgctgaaatgcggctggtgcgcttcatccgggcgaaagaaccccgtattggcaaatattgacggccagttaagccattcatgccagtaggcgcgcggacgaaagtaaacccactggtgataccattcgcgagcctccggatgacgaccgtagtgatgaatctctcctggcgggaacagcaaaatatcacccggtcggcaaacaaattctcgtccctgatttttcaccaccccctgaccgcgaatggtgagattaagaatataacctttcattcccagcggtcggtcgataaaaaaatcgagataaccgttggcctcaatcggcgttaaacccgccaccagatgggcattaaacgagtatcccggcagcaggggatcattttgcgcttcagccatacttttcatactcccaccattcagagaagaaaccaattgtccatattgcatcagacattgccgtcactgcgtcttttactggctcttctcgctaacccaaccggtaaccccgcttattaaaagcattctgtaacaaagcgggaccaaagccatgacaaaaacgcgtaacaaaagtgtctataatcacggcagaaaagtccacattgattatttgcacggcgtcacactttgctatgccatagcatttttatccataagattagcggatcctacctgacgctttttatcgcaactctctactgtttctccatacccgttttacctgcaggtgcagtaagaatgcggagttttagcaatgcctaaaatgaaaactgtaagcggtgccgccaaacgttttaagaaaacgggttctggccgctttaaaagcaaacagtctcacttacgtcacattctgactaagaagagctctaagcgtaaacgtcaccttcgtggcaaaaaactggttcatgactctgataccaaattggttcagcgcatgttgccttacgtataagacttaggagactgattaatggctagagtaaaacgcggcactatcgcacgtgctcgtcacaaaaaagtcctcaagcaggcaaaaggttattacggcgcacgttcacgtgtatatcgcgtagcggtacaagctgtaactaaagctggtcaatatgcttaccgtgaccgtcgtcagcgcaagcgtcaattccgtcaactatggattgcacgtattaacgctgctgctcgtcaaaatggtatgtcatacagccgtttcatcaacggtttgaagaaagcgtctgttgaaatcgatcgtaagatccttgccgacatcgcagtacatgacaaagcagctttcagcgcactagtcgaagcggctaaaggcgcattagcttaattattaacgaggcagagcggagttaactatgtacgcggttttccaaagtggcggtaaacaacaccgtgtggccgaaggccaaaccgttcgtcttgaaaaaatcgaagtagccccaggcgaaacggttgaatttgacaaagttttaatggtaagcaacggtgacgacgtaaaaatcggcacaccaatcgttgctggtggtaaggtgactgctgaggttgttacacacggtcgtggcgataaagtaaaaatcgttaagttccgtcgtcgtaagcactctcgtaagcaagcgggtcaccgtcagtggttcacagaagtgaaaatcactggtatcaacgcataataggagcacgaacacatggcacacaaaaaagctggtggtagtaccaaaaacggtcgtgattcagaaagtaaacgcctaggtgttaagcgctttggtggtgaatctgttcttgctggtaacatcattgttcgtcaacgtggtactcgtttccacgctggtgacaacatgggtatcggtaaagaccacacgttgtttgcactaaaagacggtaaagttcagttcgacgttaaaggaccgaagaaccgtaaatttgtaagcatcgtagctgagtaagcgcgtaatatatttttggagacagacaatgtctgaagcaaatttcaaactagacgcttctgttcgtacagacctagggaaaggtgcgagccgccgcctacgtcgcgaagataagcttcctggtatcatctacggtggtgaagaagcaccagtttctatcacactagatcataacaaagtaaacaactctgctgactttgaagcgttttattctcacgttcttgagattaaccttgacggtaaagttgttgaagttctagttaaagatatgcaacgtcacccgttcaagccaaagatcacacacattgacttccaacgtgtaatcgctggtcaagacgttcacactaacgtaccacttcacttcgtaaatgaagagaaatctgctgctgttaaagctggcggtattgctgagcaccacgtaactgaaatcgaagttacttgtctacctaagaaccttcctgagttcatcgaagtagacatggctggtgttgaaatgggtcaaacgctacacctttctgacctaactcttccagctggcgtttcttcagttgaacttgcgaagaacgacgaagctcacgacctagcggttgtaactgttaagcctgctcctaaagcggctgacgcagaagaagacggcgaagaagcagcttctgaggaataatcctgttgttgttctggagacaaatacaatgtcaagagtatgccaagtaacaggtaagcgtccaacggttggtaataaccgttcacacgcaagaaatgcgactcgtcgtcgctttttgccaaaccttcaaacacaccgtttttgggttgagagcgaaaaccgttttgtaaaactacgtttgtctgcaaaaggcatgcgtatcatcgacaagaaaggtattgattcagtactaactgacatccgtacccgtggtgagaaaatctaaggaagccgacaatgcgtgataaaattaaactagtttcttcagcaggtacaggtttcttctacactactgataaaaacaagcgtaacatgcctggcaaaatggagatcaaaaagtatgatcccgttgtgcgtaagcacgttatgttcaaagaggccaaaatcaagtaattagcttgagcgagaccaggagtaagttatggcagtacaacaaaatcgtaaaacgcgttctaagcgcggtatgcgtcgctcacacgatgcattgacaggcgcgactttgtctgtcgattcaacgtcgggcgaaactcaccgtcgtcaccacgtgaccgctgacggttattacaaaggcaagaaagtaatcggcgcgtaatacggcgaatataagtgagactttggtcatgaaaagaacatttcaaccgagcaatctaaagcgcaagcgttctcacggttttcgtgctcgtatggcgactaaaaatggtcgtaaagtactagcagctcgccgtgcaaaaggccgcgctcgtctttcagcttaattgaaagaacttaattaacggcactcctcagccaagtcaaaagcctccggtcggaggcttttgactacatgcccatggcgtttacgccccgccctgccactcatcgcagtactgttgtaattcattaagcattctgccgacatggaagccatcacaaacggcatgatgaacctgaatcgccagcggcatcagcaccttgtcgccttgcgtataatatttgcccatagtgaaaacgggggcgaagaagttgtccatattggccacgtttaaatcaaaactggtgaaactcacccagggattggctgagacgaaaaacatattctcaataaaccctttagggaaataggccaggttttcaccgtaacacgccacatcttgcgaatatatgtgtagaaactgccggaaatcgtcgtggtattcactccagagcgatgaaaacgtttcagtttgctcatggaaaacggtgtaacaagggtgaacactatcccatatcaccagctcaccgtctttcattgccatacggaactccggatgagcattcatcaggcgggcaagaatgtgaataaaggccggataaaacttgtgcttatttttctttacggtctttaaaaaggccgtaatatccagctgaacggtctggttataggtacattgagcaactgactgaaatgcctcaaaatgttctttacgatgccattgggatatatcaacggtggtatatccagtgatttttttctccattttagcttccttagctcctgaaaatctcgataactcaaaaaatacgcccggtagtgatcttatttcattatggtgaaagttggaacctcttacgtgccaagccaaataggccgt

SEQ ID NO: 274 - DNA, 6554 bp, Artificial
  Synthetic
tcagatccttccgtatttagccagtatgttctctagtgtggttcgttgtttttgcgtgagccatgagaacgaaccattgagatcatgcttactttgcatgtcactcaaaaattttgcctcaaaactggtgagctgaatttttgcagttaaagcatcgtgtagtgtttttcttagtccgttacgtaggtaggaatctgatgtaatggttgttggtattttgtcaccattcatttttatctggttgttctcaagttcggttacgagatccatttgtctatctagttcaacttggaaaatcaacgtatcagtcgggcggcctcgcttatcaaccaccaatttcatattgctgtaagtgtttaaatctttacttattggtttcaaaacccattggttaagccttttaaactcatggtagttattttcaagcattaacatgaacttaaattcatcaaggctaatctctatatttgccttgtgagttttcttttgtgttagttcttttaataaccactcataaatcctcatagagtatttgttttcaaaagacttaacatgttccagattatattttatgaatttttttaactggaaaagataaggcaatatctcttcactaaaaactaattctaatttttcgcttgagaacttggcatagtttgtccactggaaaatcttaaagcctttaaccaaaggattcctgatttccacagttctcgtcatcagctctctggttgctttagctaatacaccataagcattttccctactgatgttcatcatctgagcgtattggttataagtgaacgataccgtccgttctttccttgtagggttttcaatcgtggggttgagtagtgccacacagcataaaattagcttggtttcatgctccgttaagtcatagcgactaatcgctagttcatttgctttgaaaacaactaattcagacatacatctcaattggtctaggtgattttaatcactataccaattgagatgggctagtcaatgataattactagtccttttcctttgagttgtgggtatctgtaaattctgctagacctttgctggaaaacttgtaaattctgctagaccctctgtaaattccgctagacctttgtgtgttttttttgtttatattcaagtggttataatttatagaataaagaaagaataaaaaaagataaaaagaatagatcccagccctgtgtataactcactactttagtcagttccgcagtattacaaaaggatgtcgcaaacgctgtttgctcctctacaaaacagaccttaaaaccctaaaggcttaagtagcaccctcgcaagctcgggcaaatcgctgaatattccttttgtctccgaccatcaggcacctgagtcgctgtctttttcgtgacattcagttcgctgcgctcacggctctggcagtgaatgggggtaaatggcactacaggcgccttttatggattcatgcaaggaaactacccataatacaagaaaagcccgtcacgggcttctcagggcgttttatggcgggtctgctatgtggtgctatctgactttttgctgttcagcagttcctgccctctgattttccagtctgaccacttcggattatcccgtgacaggtcattcagactggctaatgcacccagtaaggcagcggtatcatcaacaggcttacccgtcttactgtcaagaggacatccggtcaaataaaacgaaaggctcagtcgaaagactgggcctttcgttttgctgaggagacttagggaccctttatgacaacttgacggctacatcattcactttttcttcacaaccggcacggaactcgctcgggctggccccggtgcattttttaaatacccgcgagaaatagagttgatcgtcaaaaccaacattgcgaccgacggtggcgataggcatccgggtggtgctcaaaagcagcttcgcctggctgatacgttggtcctcgcgccagcttaagacgctaatccctaactgctggcggaaaagatgtgacagacgcgacggcgacaagcaaacatgctgtgcgacgctggcgatatcaaaattgctgtctgccaggtgatcgctgatgtactgacaagcctcgcgtacccgattatccatcggtggatggagcgactcgttaatcgcttccatgcgccgcagtaacaattgctcaagcagatttatcgccagcagctccgaatagcgcccttccccttgcccggcgttaatgatttgcccaaacaggtcgctgaaatgcggctggtgcgcttcatccgggcgaaagaaccccgtattggcaaatattgacggccagttaagccattcatgccagtaggcgcgcggacgaaagtaaacccactggtgataccattcgcgagcctccggatgacgaccgtagtgatgaatctctcctggcgggaacagcaaaatatcacccggtcggcaaacaaattctcgtccctgatttttcaccaccccctgaccgcgaatggtgagattaagaatataacctttcattcccagcggtcggtcgataaaaaaatcgagataaccgttggcctcaatcggcgttaaacccgccaccagatgggcattaaacgagtatcccggcagcaggggatcattttgcgcttcagccatacttttcatactcccaccattcagagaagaaaccaattgtccatattgcatcagacattgccgtcactgcgtcttttactggctcttctcgctaacccaaccggtaaccccgcttattaaaagcattctgtaacaaagcgggaccaaagccatgacaaaaacgcgtaacaaaagtgtctataatcacggcagaaaagtccacattgattatttgcacggcgtcacactttgctatgccatagcatttttatccataagattagcggatcctacctgacgctttttatcgcaactctctactgtttctccatacccgttttacctgcaggtgcagtaagaatgcggagttttagcaatgcctaaaatgaaaactgtaagcggtgccgccaaacgttttaagaaaacgggttctggccgctttaaaagcaaacagtctcacttacgtcacattctgactaagaagagctctaagcgtaaacgtcaccttcgtggcaaaaaactggttcatgactctgataccaaattggttcagcgcatgttgccttacgtataagacttaggagactgattaatggctagagtaaaacgcggcactatcgcacgtgctcgtcacaaaaaagtcctcaagcaggcaaaaggttattacggcgcacgttcacgtgtatatcgcgtagcggtacaagctgtaactaaagctggtcaatatgcttaccgtgaccgtcgtcagcgcaagcgtcaattccgtcaactatggattgcacgtattaacgctgctgctcgtcaaaatggtatgtcatacagccgtttcatcaacggtttgaagaaagcgtctgttgaaatcgatcgtaagatccttgccgacatcgcagtacatgacaaagcagctttcagcgcactagtcgaagcggctaaaggcgcattagcttaattattaacgaggcagagcggagttaactatgtacgcggttttccaaagtggcggtaaacaacaccgtgtggccgaaggccaaaccgttcgtcttgaaaaaatcgaagtagccccaggcgaaacggttgaatttgacaaagttttaatggtaagcaacggtgacgacgtaaaaatcggcacaccaatcgttgctggtggtaaggtgactgctgaggttgttacacacggtcgtggcgataaagtaaaaatcgttaagttccgtcgtcgtaagcactctcgtaagcaagcgggtcaccgtcagtggttcacagaagtgaaaatcactggtatcaacgcataataggagcacgaacacatggcacacaaaaaagctggtggtagtaccaaaaacggtcgtgattcagaaagtaaacgcctaggtgttaagcgctttggtggtgaatctgttcttgctggtaacatcattgttcgtcaacgtggtactcgtttccacgctggtgacaacatgggtatcggtaaagaccacacgttgtttgcactaaaagacggtaaagttcagttcgacgttaaaggaccgaagaaccgtaaatttgtaagcatcgtagctgagtaagcgcgtaatatatttttggagacagacaatgtctgaagcaaatttcaaactagacgcttctgttcgtacagacctagggaaaggtgcgagccgccgcctacgtcgcgaagataagcttcctggtatcatctacggtggtgaagaagcaccagtttctatcacactagatcataacaaagtaaacaactctgctgactttgaagcgttttattctcacgttcttgagattaaccttgacggtaaagttgttgaagttctagttaaagatatgcaacgtcacccgttcaagccaaagatcacacacattgacttccaacgtgtaatcgctggtcaagacgttcacactaacgtaccacttcacttcgtaaatgaagagaaatctgctgctgttaaagctggcggtattgctgagcaccacgtaactgaaatcgaagttacttgtctacctaagaaccttcctgagttcatcgaagtagacatggctggtgttgaaatgggtcaaacgctacacctttctgacctaactcttccagctggcgtttcttcagttgaacttgcgaagaacgacgaagctcacgacctagcggttgtaactgttaagcctgctcctaaagcggctgacgcagaagaagacggcgaagaagcagcttctgaggaataatcctgttgttgttctggagacaaatacaatgtcaagagtatgccaagtaacaggtaagcgtccaacggttggtaataaccgttcacacgcaagaaatgcgactcgtcgtcgctttttgccaaaccttcaaacacaccgtttttgggttgagagcgaaaaccgttttgtaaaactacgtttgtctgcaaaaggcatgcgtatcatcgacaagaaaggtattgattcagtactaactgacatccgtacccgtggtgagaaaatctaaggaagccgacaatgcgtgataaaattaaactagtttcttcagcaggtacaggtttcttctacactactgataaaaacaagcgtaacatgcctggcaaaatggagatcaaaaagtatgatcccgttgtgcgtaagcacgttatgttcaaagaggccaaaatcaagtaattagcttgttattatgtgaggtaacccaatgaaacaagatatccacccaaaatacgaagaaatcacagcaacttgctcatgtggtaacgtaatgaacattcgttctacgcttggtaaagacatcaacctagacgtatgttcttcatgtcacccattctacactggtaagcaacgtaacgttgacactggtggtcgtgttgatcgcttcaagaagcgtttcggtgcattgggcaaaaagtaagcctgataatataagtgagactttggtcatgaaaagaacatttcaaccgagcaatctaaagcgcaagcgttctcacggttttcgtgctcgtatggcgactaaaaatggtcgtaaagtactagcagctcgccgtgcaaaaggccgcgctcgtctttcagcttaattgaaagaacttaattaacggcactcctcagccaagtcaaaagcctccggtcggaggcttttgactacatgcccatggcgtttacgccccgccctgccactcatcgcagtactgttgtaattcattaagcattctgccgacatggaagccatcacaaacggcatgatgaacctgaatcgccagcggcatcagcaccttgtcgccttgcgtataatatttgcccatagtgaaaacgggggcgaagaagttgtccatattggccacgtttaaatcaaaactggtgaaactcacccagggattggctgagacgaaaaacatattctcaataaaccctttagggaaataggccaggttttcaccgtaacacgccacatcttgcgaatatatgtgtagaaactgccggaaatcgtcgtggtattcactccagagcgatgaaaacgtttcagtttgctcatggaaaacggtgtaacaagggtgaacactatcccatatcaccagctcaccgtctttcattgccatacggaactccggatgagcattcatcaggcgggcaagaatgtgaataaaggccggataaaacttgtgcttatttttctttacggtctttaaaaaggccgtaatatccagctgaacggtctggttataggtacattgagcaactgactgaaatgcctcaaaatgttctttacgatgccattgggatatatcaacggtggtatatccagtgatttttttctccattttagcttccttagctcctgaaaatctcgataactcaaaaaatacgcccggtagtgatcttatttcattatggtgaaagttggaacctcttacgtgccaagccaaataggccgt

SEQ ID NO: 275 - DNA, 6590 bp, Artificial
  Synthetic
tcagatccttccgtatttagccagtatgttctctagtgtggttcgttgtttttgcgtgagccatgagaacgaaccattgagatcatgcttactttgcatgtcactcaaaaattttgcctcaaaactggtgagctgaatttttgcagttaaagcatcgtgtagtgtttttcttagtccgttacgtaggtaggaatctgatgtaatggttgttggtattttgtcaccattcatttttatctggttgttctcaagttcggttacgagatccatttgtctatctagttcaacttggaaaatcaacgtatcagtcgggcggcctcgcttatcaaccaccaatttcatattgctgtaagtgtttaaatctttacttattggtttcaaaacccattggttaagccttttaaactcatggtagttattttcaagcattaacatgaacttaaattcatcaaggctaatctctatatttgccttgtgagttttcttttgtgttagttcttttaataaccactcataaatcctcatagagtatttgttttcaaaagacttaacatgttccagattatattttatgaatttttttaactggaaaagataaggcaatatctcttcactaaaaactaattctaatttttcgcttgagaacttggcatagtttgtccactggaaaatcttaaagcctttaaccaaaggattcctgatttccacagttctcgtcatcagctctctggttgctttagctaatacaccataagcattttccctactgatgttcatcatctgagcgtattggttataagtgaacgataccgtccgttctttccttgtagggttttcaatcgtggggttgagtagtgccacacagcataaaattagcttggtttcatgctccgttaagtcatagcgactaatcgctagttcatttgctttgaaaacaactaattcagacatacatctcaattggtctaggtgattttaatcactataccaattgagatgggctagtcaatgataattactagtccttttcctttgagttgtgggtatctgtaaattctgctagacctttgctggaaaacttgtaaattctgctagaccctctgtaaattccgctagacctttgtgtgttttttttgtttatattcaagtggttataatttatagaataaagaaagaataaaaaaagataaaaagaatagatcccagccctgtgtataactcactactttagtcagttccgcagtattacaaaaggatgtcgcaaacgctgtttgctcctctacaaaacagaccttaaaaccctaaaggcttaagtagcaccctcgcaagctcgggcaaatcgctgaatattccttttgtctccgaccatcaggcacctgagtcgctgtctttttcgtgacattcagttcgctgcgctcacggctctggcagtgaatgggggtaaatggcactacaggcgccttttatggattcatgcaaggaaactacccataatacaagaaaagcccgtcacgggcttctcagggcgttttatggcgggtctgctatgtggtgctatctgactttttgctgttcagcagttcctgccctctgattttccagtctgaccacttcggattatcccgtgacaggtcattcagactggctaatgcacccagtaaggcagcggtatcatcaacaggcttacccgtcttactgtcaagaggacatccggtcaaataaaacgaaaggctcagtcgaaagactgggcctttcgttttgctgaggagacttagggaccctttatgacaacttgacggctacatcattcactttttcttcacaaccggcacggaactcgctcgggctggccccggtgcattttttaaatacccgcgagaaatagagttgatcgtcaaaaccaacattgcgaccgacggtggcgataggcatccgggtggtgctcaaaagcagcttcgcctggctgatacgttggtcctcgcgccagcttaagacgctaatccctaactgctggcggaaaagatgtgacagacgcgacggcgacaagcaaacatgctgtgcgacgctggcgatatcaaaattgctgtctgccaggtgatcgctgatgtactgacaagcctcgcgtacccgattatccatcggtggatggagcgactcgttaatcgcttccatgcgccgcagtaacaattgctcaagcagatttatcgccagcagctccgaatagcgcccttccccttgcccggcgttaatgatttgcccaaacaggtcgctgaaatgcggctggtgcgcttcatccgggcgaaagaaccccgtattggcaaatattgacggccagttaagccattcatgccagtaggcgcgcggacgaaagtaaacccactggtgataccattcgcgagcctccggatgacgaccgtagtgatgaatctctcctggcgggaacagcaaaatatcacccggtcggcaaacaaattctcgtccctgatttttcaccaccccctgaccgcgaatggtgagattgagaatataacctttcattcccagcggtcggtcgataaaaaaatcgagataaccgttggcctcaatcggcgttaaacccgccaccagatgggcattaaacgagtatcccggcagcaggggatcattttgcgcttcagccatacttttcatactcccaccattcagagaagaaaccaattgtccatattgcatcagacattgccgtcactgcgtcttttactggctcttctcgctaacccaaccggtaaccccgcttattaaaagcattctgtaacaaagcgggaccaaagccatgacaaaaacgcgtaacaaaagtgtctataatcacggcagaaaagtccacattgattatttgcacggcgtcacactttgctatgccatagcatttttatccataagattagcggatcctacctgacgctttttatcgcaactctctactgtttctccatacccgttttacctgcaggtgcagtaagaatgcggagttttagcaatgcctaaaatgaaaactgtaagcggtgccgccaaacgttttaagaaaacgggttctggccgctttaaaagcaaacagtctcacttacgtcacattctgactaagaagagctctaagcgtaaacgtcaccttcgtggcaaaaaactggttcatgactctgataccaaattggttcagcgcatgttgccttacgtataagacttaggagactgattaatggctagagtaaaacgcggcactatcgcacgtgctcgtcacaaaaaagtcctcaagcaggcaaaaggttattacggcgcacgttcacgtgtatatcgcgtagcggtacaagctgtaactaaagctggtcaatatgcttaccgtgaccgtcgtcagcgcaagcgtcaattccgtcaactatggattgcacgtattaacgctgctgctcgtcaaaatggtatgtcatacagccgtttcatcaacggtttgaagaaagcgtctgttgaaatcgatcgtaagatccttgccgacatcgcagtacatgacaaagcagctttcagcgcactagtcgaagcggctaaaggcgcattagcttaattattaacgaggcagagcggagttaactatgtacgcggttttccaaagtggcggtaaacaacaccgtgtggccgaaggccaaaccgttcgtcttgaaaaaatcgaagtagccccaggcgaaacggttgaatttgacaaagttttaatggtaagcaacggtgacgacgtaaaaatcggcacaccaatcgttgctggtggtaaggtgactgctgaggttgttacacacggtcgtggcgataaagtaaaaatcgttaagttccgtcgtcgtaagcactctcgtaagcaagcgggtcaccgtcagtggttcacagaagtgaaaatcactggtatcaacgcataataggagcacgaacacatggcacacaaaaaagctggtggtagtaccaaaaacggtcgtgattcagaaagtaaacgcctaggtgttaagcgctttggtggtgaatctgttcttgctggtaacatcattgttcgtcaacgtggtactcgtttccacgctggtgacaacatgggtatcggtaaagaccacacgttgtttgcactaaaagacggtaaagttcagttcgacgttaaaggaccgaagaaccgtaaatttgtaagcatcgtagctgagtaagcgcgtaatatatttttggagacagacaatgtctgaagcaaatttcaaactagacgcttctgttcgtacagacctagggaaaggtgcgagccgccgcctacgtcgcgaagataagcttcctggtatcatctacggtggtgaagaagcaccagtttctatcacactagatcataacaaagtaaacaactctgctgactttgaagcgttttattctcacgttcttgagattaaccttgacggtaaagttgttgaagttctagttaaagatatgcaacgtcacccgttcaagccaaagatcacacacattgacttccaacgtgtaatcgctggtcaagacgttcacactaacgtaccacttcacttcgtaaatgaagagaaatctgctgctgttaaagctggcggtattgctgagcaccacgtaactgaaatcgaagttacttgtctacctaagaaccttcctgagttcatcgaagtagacatggctggtgttgaaatgggtcaaacgctacacctttctgacctaactcttccagctggcgtttcttcagttgaacttgcgaagaacgacgaagctcacgacctagcggttgtaactgttaagcctgctcctaaagcggctgacgcagaagaagacggcgaagaagcagcttctgaggaataatcctgttgttgttctggagacaaatacaatgtcaagagtatgccaagtaacaggtaagcgtccaacggttggtaataaccgttcacacgcaagaaatgcgactcgtcgtcgctttttgccaaaccttcaaacacaccgtttttgggttgagagcgaaaaccgttttgtaaaactacgtttgtctgcaaaaggcatgcgtatcatcgacaagaaaggtattgattcagtactaactgacatccgtacccgtggtgagaaaatctaaggaagccgacaatgcgtgataaaattaaactagtttcttcagcaggtacaggtttcttctacactactgataaaaacaagcgtaacatgcctggcaaaatggagatcaaaaagtatgatcccgttgtgcgtaagcacgttatgttcaaagaggccaaaatcaagtaattagcttgttattatgtgaggtaacccaatgaaacaagatatccacccaaaatacgaagaaatcacagcaacttgctcatgtggtaacgtaatgaacattcgttctacgcttggtaaagacatcaacctagacgtatgttcttcatgtcacccattctacactggtaagcaacgtaacgttgacactggtggtcgtgttgatcgcttcaagaagcgtttcggtgcattgggcaaaaagtaagcctgataagcgagaccaggagtaagttatggcagtacaacaaaatcgtaaaacgcgttctaagcgcggtatgcgtcgctcacacgatgcattgacaggcgcgactttgtctgtcgattcaacgtcgggcgaaactcaccgtcgtcaccacgtgaccgctgacggttattacaaaggcaagaaagtaatcggcgcgtaatacggcgaacttaattaacggcactcctcagccaagtcaaaagcctccggtcggaggcttttgactacatgcccatggcgtttacgccccgccctgccactcatcgcagtactgttgtaattcattaagcattctgccgacatggaagccatcacaaacggcatgatgaacctgaatcgccagcggcatcagcaccttgtcgccttgcgtataatatttgcccatagtgaaaacgggggcgaagaagttgtccatattggccacgtttaaatcaaaactggtgaaactcacccagggattggctgagacgaaaaacatattctcaataaaccctttagggaaataggccaggttttcaccgtaacacgccacatcttgcgaatatatgtgtagaaactgccggaaatcgtcgtggtattcactccagagcgatgaaaacgtttcagtttgctcatggaaaacggtgtaacaagggtgaacactatcccatatcaccagctcaccgtctttcattgccatacggaactccggatgagcattcatcaggcgggcaagaatgtgaataaaggccggataaaacttgtgcttatttttctttacggtctttaaaaaggccgtaatatccagctgaacggtctggttataggtacattgagcaactgactgaaatgcctcaaaatgttctttacgatgccattgggatatatcaacggtggtatatccagtgatttttttctccattttagcttccttagctcctgaaaatctcgataactcaaaaaatacgcccggtagtgatcttatttcattatggtgaaagttggaacctcttacgtgccaagccaaataggccgt

SEQ ID NO: 276 - DNA, 6123 bp, Artificial
  Synthetic
tcagatccttccgtatttagccagtatgttctctagtgtggttcgttgtttttgcgtgagccatgagaacgaaccattgagatcatgcttactttgcatgtcactcaaaaattttgcctcaaaactggtgagctgaatttttgcagttaaagcatcgtgtagtgtttttcttagtccgttacgtaggtaggaatctgatgtaatggttgttggtattttgtcaccattcatttttatctggttgttctcaagttcggttacgagatccatttgtctatctagttcaacttggaaaatcaacgtatcagtcgggcggcctcgcttatcaaccaccaatttcatattgctgtaagtgtttaaatctttacttattggtttcaaaacccattggttaagccttttaaactcatggtagttattttcaagcattaacatgaacttaaattcatcaaggctaatctctatatttgccttgtgagttttcttttgtgttagttcttttaataaccactcataaatcctcatagagtatttgttttcaaaagacttaacatgttccagattatattttatgaatttttttaactggaaaagataaggcaatatctcttcactaaaaactaattctaatttttcgcttgagaacttggcatagtttgtccactggaaaatcttaaagcctttaaccaaaggattcctgatttccacagttctcgtcatcagctctctggttgctttagctaatacaccataagcattttccctactgatgttcatcatctgagcgtattggttataagtgaacgataccgtccgttctttccttgtagggttttcaatcgtggggttgagtagtgccacacagcataaaattagcttggtttcatgctccgttaagtcatagcgactaatcgctagttcatttgctttgaaaacaactaattcagacatacatctcaattggtctaggtgattttaatcactataccaattgagatgggctagtcaatgataattactagtccttttcctttgagttgtgggtatctgtaaattctgctagacctttgctggaaaacttgtaaattctgctagaccctctgtaaattccgctagacctttgtgtgttttttttgtttatattcaagtggttataatttatagaataaagaaagaataaaaaaagataaaaagaatagatcccagccctgtgtataactcactactttagtcagttccgcagtattacaaaaggatgtcgcaaacgctgtttgctcctctacaaaacagaccttaaaaccctaaaggcttaagtagcaccctcgcaagctcgggcaaatcgctgaatattccttttgtctccgaccatcaggcacctgagtcgctgtctttttcgtgacattcagttcgctgcgctcacggctctggcagtgaatgggggtaaatggcactacaggcgccttttatggattcatgcaaggaaactacccataatacaagaaaagcccgtcacgggcttctcagggcgttttatggcgggtctgctatgtggtgctatctgactttttgctgttcagcagttcctgccctctgattttccagtctgaccacttcggattatcccgtgacaggtcattcagactggctaatgcacccagtaaggcagcggtatcatcaacaggcttacccgtcttactgtcaagaggacatccggtcaaataaaacgaaaggctcagtcgaaagactgggcctttcgttttgctgaggagacttagggaccctttatgacaacttgacggctacatcattcactttttcttcacaaccggcacggaactcgctcgggctggccccggtgcattttttaaatacccgcgagaaatagagttgatcgtcaaaaccaacattgcgaccgacggtggcgataggcatccgggtggtgctcaaaagcagcttcgcctggctgatacgttggtcctcgcgccagcttaagacgctaatccctaactgctggcggaaaagatgtgacagacgcgacggcgacaagcaaacatgctgtgcgacgctggcgatatcaaaattgctgtctgccaggtgatcgctgatgtactgacaagcctcgcgtacccgattatccatcggtggatggagcgactcgttaatcgcttccatgcgccgcagtaacaattgctcaagcagatttatcgccagcagctccgaatagcgcccttccccttgcccggcgttaatgatttgcccaaacaggtcgctgaaatgcggctggtgcgcttcatccgggcgaaagaaccccgtattggcaaatattgacggccagttaagccattcatgccagtaggcgcgcggacgaaagtaaacccactggtgataccattcgcgagcctccggatgacgaccgtagtgatgaatctctcctggcgggaacagcaaaatatcacccggtcggcaaacaaattctcgtccctgatttttcaccaccccctgaccgcgaatggtgagattgagaatataacctttcattcccagcggtcggtcgataaaaaaatcgagataaccgttggcctcaatcggcgttaaacccgccaccagatgggcattaaacgagtatcccggcagcaggggatcattttgcgcttcagccatacttttcatactcccaccattcagagaagaaaccaattgtccatattgcatcagacattgccgtcactgcgtcttttactggctcttctcgctaacccaaccggtaaccccgcttattaaaagcattctgtaacaaagcgggaccaaagccatgacaaaaacgcgtaacaaaagtgtctataatcacggcagaaaagtccacattgattatttgcacggcgtcacactttgctatgccatagcatttttatccataagattagcggatcctacctgacgctttttatcgcaactctctactgtttctccatacccgttttacctgcaggtgcagtttctttcaggagattccaatatggcaaacagcgcacaagcacgcaaacgtgcccgccagtccgtcaaacaacgcgcccacaacgctagcctgcgtaccgcattccgcaccgcagtgaaaaaagtattgaaagcagtcgaagcaggcgataaagctgccgcacgagcggtttaccaagagtccgtcaaagtcatcgaccgcatcgccgacaaaggcgtgttccacaaaaacaaagcggctcgccacaaaagccgcctgtctgcaaaagtaaaagcactggcttgatttttgcattttctcaaaaggactcaaaatggtagttatccgtttggcacgcggcggctcgaaacaccgccccttctacaacgtcatcgttactgactcacgcagccgccgcgacggccgcttcatcgaacgcgtaggcttctacaaccccgtagccaacgaaaaacaagagcgcgtccgcctcaatgcagaccgcctgaaccactggattgcacaaggcgcgcaagtcagcgactccgttgcaaaactgattaaagaacaaaaagccgtctaatccgcgtttgtaccgaaaagagttatatatgtctatggaaaattttgctcagctgttggaagaaagctttaccctgcaagaaatgaacccgggtgaggtgattaccgctgaagtagtggcaatcgaccaaaacttcgttaccgtaaacgcaggtctgaaatcagaatccctgatcgatgtagctgaattcaaaaacgctcaaggcgaaattgaagttaaagtcggcgacttcgttaccgttaccatcgaatccgtcgaaaacggcttcggcgaaaccaaactgtcccgcgaaaaagccaaacgcgcagccgattggatcgctttggaagaagccatggaaaacggcaacatcctgtccggcatcatcaacggtaaagtcaaaggcggcctgaccgttatgatcagcagcatccgcgcattcctgccgggttctttggtcgacgtacgtcccgttaaagacacttcccattttgaaggcaaagagatcgaattcaaagtgatcaaactggacaaaaaacgcaacaacgtcgttgtttcccgccgcgccgttttggaagccactttgggtgaagaacgcaaagccctgctggaaaacctgcaagaaggctccgtcatcaaaggcatcgtcaaaaatatcaccgactacggcgcattcgttgacctgggcggcatcgacggcctgctgcacatcaccgatttggcatggcgtcgcgtgaaacacccgagcgaagtcttggaagtcggtcaggaagttgaagccaaagtattgaaattcgaccaagaaaaacaacgtgtttccttgggtatgaaacaactgggcgaagatccttggagcggtctgacccgccgttatccgcaagccacccgcctgttcggcaaagtatccaacctgaccgactacggcgcattcgtcgaaatcgaacaaggcatcgaaggtttggtacacgtctccgaaatggactggaccaacaaaaacgtacacccgagcaaagtcgtacaactgggtgacgaagtcgaagtcatgattttggaaatcgacgaaggccgccgccgtatctctttgggtatgaaacaatgccaagccaatccttgggaagaatttgccgccaaccacaacaaaggagacaaaatctccggtgcggttaaatccattaccgatttcggcgtattcgtcggcctgcccggcggcatcgacggtctggttcacctgtccgacctgtcttggaccgaatccggcgaagaagccgtacgcaaatacaaaaaaggagaagaagtcgaagccgtcgtattggcaatcgatgtggaaaaagaacgcatctccttgggtatcaaacaactggaaggcgatcctttcggcaacttcatcagcgtgaacgacaaaggttctttggttaaaggttccgtgaaatctgttgatgccaaaggcgctgttatcgccctgtctgacgaagtagaaggctacctgcctgcttccgaatttgcagccgaccgcgttgaagacttgaccaccaaactgaaagaaggcgatgaagttgaagccgtcatcgttaccgttgaccgcaaaaaccgcagcatcaaactttccgttaaagccaaagatgccaaagaaagccgcgaagcactgaactccgtcaatgccgccgccaatgcgaatgccggtaccaccagcttgggcgacctgctgaaagccaaactctccggcgaacaagaataaggttgcagacttaattaacggcactcctcagccaagtcaaaagcctccggtcggaggcttttgactacatgcccatggcgtttacgccccgccctgccactcatcgcagtactgttgtaattcattaagcattctgccgacatggaagccatcacaaacggcatgatgaacctgaatcgccagcggcatcagcaccttgtcgccttgcgtataatatttgcccatagtgaaaacgggggcgaagaagttgtccatattggccacgtttaaatcaaaactggtgaaactcacccagggattggctgagacgaaaaacatattctcaataaaccctttagggaaataggccaggttttcaccgtaacacgccacatcttgcgaatatatgtgtagaaactgccggaaatcgtcgtggtattcactccagagcgatgaaaacgtttcagtttgctcatggaaaacggtgtaacaagggtgaacactatcccatatcaccagctcaccgtctttcattgccatacggaactccggatgagcattcatcaggcgggcaagaatgtgaataaaggccggataaaacttgtgcttatttttctttacggtctttaaaaaggccgtaatatccagctgaacggtctggttataggtacattgagcaactgactgaaatgcctcaaaatgttctttacgatgccattgggatatatcaacggtggtatatccagtgatttttttctccattttagcttccttagctcctgaaaatctcgataactcaaaaaatacgcccggtagtgatcttatttcattatggtgaaagttggaacctcttacgtgccaagccaaataggccgt

SEQ ID NO: 277 - DNA, 6168 bp, Artificial
  Synthetic
tcagatccttccgtatttagccagtatgttctctagtgtggttcgttgtttttgcgtgagccatgagaacgaaccattgagatcatgcttactttgcatgtcactcaaaaattttgcctcaaaactggtgagctgaatttttgcagttaaagcatcgtgtagtgtttttcttagtccgttacgtaggtaggaatctgatgtaatggttgttggtattttgtcaccattcatttttatctggttgttctcaagttcggttacgagatccatttgtctatctagttcaacttggaaaatcaacgtatcagtcgggcggcctcgcttatcaaccaccaatttcatattgctgtaagtgtttaaatctttacttattggtttcaaaacccattggttaagccttttaaactcatggtagttattttcaagcattaacatgaacttaaattcatcaaggctaatctctatatttgccttgtgagttttcttttgtgttagttcttttaataaccactcataaatcctcatagagtatttgttttcaaaagacttaacatgttccagattatattttatgaatttttttaactggaaaagataaggcaatatctcttcactaaaaactaattctaatttttcgcttgagaacttggcatagtttgtccactggaaaatcttaaagcctttaaccaaaggattcctgatttccacagttctcgtcatcagctctctggttgctttagctaatacaccataagcattttccctactgatgttcatcatctgagcgtattggttataagtgaacgataccgtccgttctttccttgtagggttttcaatcgtggggttgagtagtgccacacagcataaaattagcttggtttcatgctccgttaagtcatagcgactaatcgctagttcatttgctttgaaaacaactaattcagacatacatctcaattggtctaggtgattttaatcactataccaattgagatgggctagtcaatgataattactagtccttttcctttgagttgtgggtatctgtaaattctgctagacctttgctggaaaacttgtaaattctgctagaccctctgtaaattccgctagacctttgtgtgttttttttgtttatattcaagtggttataatttatagaataaagaaagaataaaaaaagataaaaagaatagatcccagccctgtgtataactcactactttagtcagttccgcagtattacaaaaggatgtcgcaaacgctgtttgctcctctacaaaacagaccttaaaaccctaaaggcttaagtagcaccctcgcaagctcgggcaaatcgctgaatattccttttgtctccgaccatcaggcacctgagtcgctgtctttttcgtgacattcagttcgctgcgctcacggctctggcagtgaatgggggtaaatggcactacaggcgccttttatggattcatgcaaggaaactacccataatacaagaaaagcccgtcacgggcttctcagggcgttttatggcgggtctgctatgtggtgctatctgactttttgctgttcagcagttcctgccctctgattttccagtctgaccacttcggattatcccgtgacaggtcattcagactggctaatgcacccagtaaggcagcggtatcatcaacaggcttacccgtcttactgtcaagaggacatccggtcaaataaaacgaaaggctcagtcgaaagactgggcctttcgttttgctgaggagacttagggaccctttatgacaacttgacggctacatcattcactttttcttcacaaccggcacggaactcgctcgggctggccccggtgcattttttaaatacccgcgagaaatagagttgatcgtcaaaaccaacattgcgaccgacggtggcgataggcatccgggtggtgctcaaaagcagcttcgcctggctgatacgttggtcctcgcgccagcttaagacgctaatccctaactgctggcggaaaagatgtgacagacgcgacggcgacaagcaaacatgctgtgcgacgctggcgatatcaaaattgctgtctgccaggtgatcgctgatgtactgacaagcctcgcgtacccgattatccatcggtggatggagcgactcgttaatcgcttccatgcgccgcagtaacaattgctcaagcagatttatcgccagcagctccgaatagcgcccttccccttgcccggcgttaatgatttgcccaaacaggtcgctgaaatgcggctggtgcgcttcatccgggcgaaagaaccccgtattggcaaatattgacggccagttaagccattcatgccagtaggcgcgcggacgaaagtaaacccactggtgataccattcgcgagcctccggatgacgaccgtagtgatgaatctctcctggcgggaacagcaaaatatcacccggtcggcaaacaaattctcgtccctgatttttcaccaccccctgaccgcgaatggtgagattgagaatataacctttcattcccagcggtcggtcgataaaaaaatcgagataaccgttggcctcaatcggcgttaaacccgccaccagatgggcattaaacgagtatcccggcagcaggggatcattttgcgcttcagccatacttttcatactcccaccattcagagaagaaaccaattgtccatattgcatcagacattgccgtcactgcgtcttttactggctcttctcgctaacccaaccggtaaccccgcttattaaaagcattctgtaacaaagcgggaccaaagccatgacaaaaacgcgtaacaaaagtgtctataatcacggcagaaaagtccacattgattatttgcacggcgtcacactttgctatgccatagcatttttatccataagattagcggatcctacctgacgctttttatcgcaactctctactgtttctccatacccgttttacctgcaggtgcagtattcatactagctaagcaacatggccaataccgcccaagcccgcaagcgcgctcgccaatcggtccagcgcaacaagcacaactccagcctgcgctcgatgctgcgcaccgccatcaagcgcgttcgccaatccatcgccactggcgataaggctgctgctggcgaaacgctgcgtaaagccacgagcgtgattgacagcgtggctgacaagaacatcatccacaagaacaaggctgctcgccacaagagccgcctggctgccgccgtcaaggcgctggcctaaagcaagtaaccaattcaagggattacctatgctggtgattcgtctggcccgcggtggctcgaagaagcgtccgttttacaacctggtagctaccgattcgcgcaatcgtcgcgatggccgtttcgtcgagcgcgttggcttttacaacccggttgccgctgaaggcaccgagaatctgcgcatcgccctggaccgcgtgcaatactggaccggcaacggcgcgctgctgtcgcccgccgtcgagcgcctggtcaaggaatactcggccaaggtttcggctgctgcctgagcccgctggccaaatggattccaacctaatgtcttccgtttccacctccgccatccttggcggcgaaaacttcgccgacctgttcgcagaaagcctcaagagccaggacatgaagtccggcgaggtcatcagcgcagaagtcgtgcgcgtcgaccacaacttcgtggtcgtcaacgccggcctgaagtccgaagcgctgattcccctggaagagttcctcaacgaccagggcgaactcgaagttcaacccggcgacttcgtctcggtggcgatcgattcgctggagaacggctacggcgacaccatcctgtcgcgcgaccgcgccaagcgtctgtcggcctggctgcaactggagcaggccctcgagaacggcgagctggtcaccggcacgatcaccggcaaggtcaagggcggcctgaccgtcatgaccaacggcatccgcgcgttcctgcccggttcgctggtcgacctgcgtccggtcaaggacaccacgccgtacgaaggcaagaccctcgaattcaaggtcatcaagctggaccgcaagcgcaacaacgtcgtgctgtcgcgccgccaggtgctggaagccagcatgggcgaagagcgccagaagctgctcgagacgctgcacgaaggcgcggtggtcaagggcgtggtcaagaacatcaccgactacggcgcgttcgtcgacctgggcggcatcgatggcctgctgcacatcaccgacatggcctggcgccgtgtgcgtcacccgtccgaagtcctgcaagtgggtcaggaagtcgaagccaaggtgctcaagttcgaccaggaaaagagccgcgtctccctgggcgtcaagcagctgggcgaagatccgtgggtgggcctggctcgccgctacccgcagggcacccgcctgttcggcaaggtcaccaacctgaccgactacggcgcgttcgtcgaagtcgaagccggcatcgaaggcctggtgcacgtgtccgaaatggactggaccaacaagaacgtcgatccgcgcaaggtcgtgaccctgggcgaagaagtcgaagtcatggtcctggaaatcgacgaagaccgtcgccgcatttcgctgggcatgaagcagtgccgccagaacccgtgggaagagttcgccaccaacttcaagcgtggtgacaaggtccgcggcgccatcaagtcgatcaccgacttcggcgtgttcgtcggcctgcccggcggcatcgacggcctggtccatctgtccgacctgtcgtggacggaatcgggcgaggaagccgtgcgcaacttcaagaagggcgacgagctggaagccgtggtgctgggcatcgataccgagaaagagcgcatctcgctgggtatcaagcagctcgaaggcgacccgttcaacaacttcgttgccacgcacgacaagggcgccgttgttccgggcaccatcaagtcggtcgagcccaagggcgccgtgatcaccctgtcggtggatgtggaaggctacctgcgcgcctccgagatctcctcgggccgcgtcgaagacgctaccaccgtgctgaaggctggcgagaacatcgaagccatgatcgtcaacatcgaccgcaaggcgcgttcgatccagctgtcgatcaaggcccgcgataacgccgagacggccgagaccatccagcgcatgtccgaggcgagcgcttcgtcgggtacgacgaacttgggcgcgctgctcaaggccaagctggaccaacagcgcaacgacggttgacgtgaccaacttaattaacggcactcctcagccaagtcaaaagcctccggtcggaggcttttgactacatgcccatggcgtttacgccccgccctgccactcatcgcagtactgttgtaattcattaagcattctgccgacatggaagccatcacaaacggcatgatgaacctgaatcgccagcggcatcagcaccttgtcgccttgcgtataatatttgcccatagtgaaaacgggggcgaagaagttgtccatattggccacgtttaaatcaaaactggtgaaactcacccagggattggctgagacgaaaaacatattctcaataaaccctttagggaaataggccaggttttcaccgtaacacgccacatcttgcgaatatatgtgtagaaactgccggaaatcgtcgtggtattcactccagagcgatgaaaacgtttcagtttgctcatggaaaacggtgtaacaagggtgaacactatcccatatcaccagctcaccgtctttcattgccatacggaactccggatgagcattcatcaggcgggcaagaatgtgaataaaggccggataaaacttgtgcttatttttctttacggtctttaaaaaggccgtaatatccagctgaacggtctggttataggtacattgagcaactgactgaaatgcctcaaaatgttctttacgatgccattgggatatatcaacggtggtatatccagtgatttttttctccattttagcttccttagctcctgaaaatctcgataactcaaaaaatacgcccggtagtgatcttatttcattatggtgaaagttggaacctcttacgtgccaagccaaataggccgt

SEQ ID NO: 278 - DNA, 4135 bp, Artificial
  Synthetic
tcagatccttccgtatttagccagtatgttctctagtgtggttcgttgtttttgcgtgagccatgagaacgaaccattgagatcatgcttactttgcatgtcactcaaaaattttgcctcaaaactggtgagctgaatttttgcagttaaagcatcgtgtagtgtttttcttagtccgttacgtaggtaggaatctgatgtaatggttgttggtattttgtcaccattcatttttatctggttgttctcaagttcggttacgagatccatttgtctatctagttcaacttggaaaatcaacgtatcagtcgggcggcctcgcttatcaaccaccaatttcatattgctgtaagtgtttaaatctttacttattggtttcaaaacccattggttaagccttttaaactcatggtagttattttcaagcattaacatgaacttaaattcatcaaggctaatctctatatttgccttgtgagttttcttttgtgttagttcttttaataaccactcataaatcctcatagagtatttgttttcaaaagacttaacatgttccagattatattttatgaatttttttaactggaaaagataaggcaatatctcttcactaaaaactaattctaatttttcgcttgagaacttggcatagtttgtccactggaaaatcttaaagcctttaaccaaaggattcctgatttccacagttctcgtcatcagctctctggttgctttagctaatacaccataagcattttccctactgatgttcatcatctgagcgtattggttataagtgaacgataccgtccgttctttccttgtagggttttcaatcgtggggttgagtagtgccacacagcataaaattagcttggtttcatgctccgttaagtcatagcgactaatcgctagttcatttgctttgaaaacaactaattcagacatacatctcaattggtctaggtgattttaatcactataccaattgagatgggctagtcaatgataattactagtccttttcctttgagttgtgggtatctgtaaattctgctagacctttgctggaaaacttgtaaattctgctagaccctctgtaaattccgctagacctttgtgtgttttttttgtttatattcaagtggttataatttatagaataaagaaagaataaaaaaagataaaaagaatagatcccagccctgtgtataactcactactttagtcagttccgcagtattacaaaaggatgtcgcaaacgctgtttgctcctctacaaaacagaccttaaaaccctaaaggcttaagtagcaccctcgcaagctcgggcaaatcgctgaatattccttttgtctccgaccatcaggcacctgagtcgctgtctttttcgtgacattcagttcgctgcgctcacggctctggcagtgaatgggggtaaatggcactacaggcgccttttatggattcatgcaaggaaactacccataatacaagaaaagcccgtcacgggcttctcagggcgttttatggcgggtctgctatgtggtgctatctgactttttgctgttcagcagttcctgccctctgattttccagtctgaccacttcggattatcccgtgacaggtcattcagactggctaatgcacccagtaaggcagcggtatcatcaacaggcttacccgtcttactgtcaagaggacatccggtcaaataaaacgaaaggctcagtcgaaagactgggcctttcgttttgctgaggagacttagggaccctttatgacaacttgacggctacatcattcactttttcttcacaaccggcacggaactcgctcgggctggccccggtgcattttttaaatacccgcgagaaatagagttgatcgtcaaaaccaacattgcgaccgacggtggcgataggcatccgggtggtgctcaaaagcagcttcgcctggctgatacgttggtcctcgcgccagcttaagacgctaatccctaactgctggcggaaaagatgtgacagacgcgacggcgacaagcaaacatgctgtgcgacgctggcgatatcaaaattgctgtctgccaggtgatcgctgatgtactgacaagcctcgcgtacccgattatccatcggtggatggagcgactcgttaatcgcttccatgcgccgcagtaacaattgctcaagcagatttatcgccagcagctccgaatagcgcccttccccttgcccggcgttaatgatttgcccaaacaggtcgctgaaatgcggctggtgcgcttcatccgggcgaaagaaccccgtattggcaaatattgacggccagttaagccattcatgccagtaggcgcgcggacgaaagtaaacccactggtgataccattcgcgagcctccggatgacgaccgtagtgatgaatctctcctggcgggaacagcaaaatatcacccggtcggcaaacaaattctcgtccctgatttttcaccaccccctgaccgcgaatggtgagattgagaatataacctttcattcccagcggtcggtcgataaaaaaatcgagataaccgttggcctcaatcggcgttaaacccgccaccagatgggcattaaacgagtatcccggcagcaggggatcattttgcgcttcagccatacttttcatactcccaccattcagagaagaaaccaattgtccatattgcatcagacattgccgtcactgcgtcttttactggctcttctcgctaacccaaccggtaaccccgcttattaaaagcattctgtaacaaagcgggaccaaagccatgacaaaaacgcgtaacaaaagtgtctataatcacggcagaaaagtccacattgattatttgcacggcgtcacactttgctatgccatagcatttttatccataagattagcggatcctacctgacgctttttatcgcaactctctactgtttctccatacccgttttacctgcaggtgcagtaaacttaggctttattaaaaatggctaataccgcacaagcacgcaagcgcgcccgccaagcagtggctcgcaacaaacacaacgccagcatccgttccatgctgcgtaccgctatcaagcgcgttcgccaggctatcgaagccggtgacaaaactgctgctaacgaagttttccgcaaagcgaccagcatcattgatcgcgttgccgacaagaacatcattcacaagaacaaggctgcccgccacaagagccgcctgtctgctgctatcaaggccctggcctgattgctgaaacttaattaacggcactcctcagccaagtcaaaagcctccggtcggaggcttttgactacatgcccatggcgtttacgccccgccctgccactcatcgcagtactgttgtaattcattaagcattctgccgacatggaagccatcacaaacggcatgatgaacctgaatcgccagcggcatcagcaccttgtcgccttgcgtataatatttgcccatagtgaaaacgggggcgaagaagttgtccatattggccacgtttaaatcaaaactggtgaaactcacccagggattggctgagacgaaaaacatattctcaataaaccctttagggaaataggccaggttttcaccgtaacacgccacatcttgcgaatatatgtgtagaaactgccggaaatcgtcgtggtattcactccagagcgatgaaaacgtttcagtttgctcatggaaaacggtgtaacaagggtgaacactatcccatatcaccagctcaccgtctttcattgccatacggaactccggatgagcattcatcaggcgggcaagaatgtgaataaaggccggataaaacttgtgcttatttttctttacggtctttaaaaaggccgtaatatccagctgaacggtctggttataggtacattgagcaactgactgaaatgcctcaaaatgttctttacgatgccattgggatatatcaacggtggtatatccagtgatttttttctccattttagcttccttagctcctgaaaatctcgataactcaaaaaatacgcccggtagtgatcttatttcattatggtgaaagttggaacctcttacgtgccaagccaaataggccgt

SEQ ID NO: 279 - DNA, 6249 bp, Artificial
  Synthetic
tcagatccttccgtatttagccagtatgttctctagtgtggttcgttgtttttgcgtgagccatgagaacgaaccattgagatcatgcttactttgcatgtcactcaaaaattttgcctcaaaactggtgagctgaatttttgcagttaaagcatcgtgtagtgtttttcttagtccgttacgtaggtaggaatctgatgtaatggttgttggtattttgtcaccattcatttttatctggttgttctcaagttcggttacgagatccatttgtctatctagttcaacttggaaaatcaacgtatcagtcgggcggcctcgcttatcaaccaccaatttcatattgctgtaagtgtttaaatctttacttattggtttcaaaacccattggttaagccttttaaactcatggtagttattttcaagcattaacatgaacttaaattcatcaaggctaatctctatatttgccttgtgagttttcttttgtgttagttcttttaataaccactcataaatcctcatagagtatttgttttcaaaagacttaacatgttccagattatattttatgaatttttttaactggaaaagataaggcaatatctcttcactaaaaactaattctaatttttcgcttgagaacttggcatagtttgtccactggaaaatcttaaagcctttaaccaaaggattcctgatttccacagttctcgtcatcagctctctggttgctttagctaatacaccataagcattttccctactgatgttcatcatctgagcgtattggttataagtgaacgataccgtccgttctttccttgtagggttttcaatcgtggggttgagtagtgccacacagcataaaattagcttggtttcatgctccgttaagtcatagcgactaatcgctagttcatttgctttgaaaacaactaattcagacatacatctcaattggtctaggtgattttaatcactataccaattgagatgggctagtcaatgataattactagtccttttcctttgagttgtgggtatctgtaaattctgctagacctttgctggaaaacttgtaaattctgctagaccctctgtaaattccgctagacctttgtgtgttttttttgtttatattcaagtggttataatttatagaataaagaaagaataaaaaaagataaaaagaatagatcccagccctgtgtataactcactactttagtcagttccgcagtattacaaaaggatgtcgcaaacgctgtttgctcctctacaaaacagaccttaaaaccctaaaggcttaagtagcaccctcgcaagctcgggcaaatcgctgaatattccttttgtctccgaccatcaggcacctgagtcgctgtctttttcgtgacattcagttcgctgcgctcacggctctggcagtgaatgggggtaaatggcactacaggcgccttttatggattcatgcaaggaaactacccataatacaagaaaagcccgtcacgggcttctcagggcgttttatggcgggtctgctatgtggtgctatctgactttttgctgttcagcagttcctgccctctgattttccagtctgaccacttcggattatcccgtgacaggtcattcagactggctaatgcacccagtaaggcagcggtatcatcaacaggcttacccgtcttactgtcaagaggacatccggtcaaataaaacgaaaggctcagtcgaaagactgggcctttcgttttgctgaggagacttagggaccctttatgacaacttgacggctacatcattcactttttcttcacaaccggcacggaactcgctcgggctggccccggtgcattttttaaatacccgcgagaaatagagttgatcgtcaaaaccaacattgcgaccgacggtggcgataggcatccgggtggtgctcaaaagcagcttcgcctggctgatacgttggtcctcgcgccagcttaagacgctaatccctaactgctggcggaaaagatgtgacagacgcgacggcgacaagcaaacatgctgtgcgacgctggcgatatcaaaattgctgtctgccaggtgatcgctgatgtactgacaagcctcgcgtacccgattatccatcggtggatggagcgactcgttaatcgcttccatgcgccgcagtaacaattgctcaagcagatttatcgccagcagctccgaatagcgcccttccccttgcccggcgttaatgatttgcccaaacaggtcgctgaaatgcggctggtgcgcttcatccgggcgaaagaaccccgtattggcaaatattgacggccagttaagccattcatgccagtaggcgcgcggacgaaagtaaacccactggtgataccattcgcgagcctccggatgacgaccgtagtgatgaatctctcctggcgggaacagcaaaatatcacccggtcggcaaacaaattctcgtccctgatttttcaccaccccctgaccgcgaatggtgagattgagaatataacctttcattcccagcggtcggtcgataaaaaaatcgagataaccgttggcctcaatcggcgttaaacccgccaccagatgggcattaaacgagtatcccggcagcaggggatcattttgcgcttcagccatacttttcatactcccaccattcagagaagaaaccaattgtccatattgcatcagacattgccgtcactgcgtcttttactggctcttctcgctaacccaaccggtaaccccgcttattaaaagcattctgtaacaaagcgggaccaaagccatgacaaaaacgcgtaacaaaagtgtctataatcacggcagaaaagtccacattgattatttgcacggcgtcacactttgctatgccatagcatttttatccataagattagcggatcctacctgacgctttttatcgcaactctctactgtttctccatacccgttttacctgcaggtgcagtaaaatataagggactcggtgatggctaatcattcttcagcaaaaaaagctgttagacaaacagtaaaaagaactctaatcaataaaaaacgatctagtgcaataaagacttttataaagaaagttgtacatgaaatcagtcttggtaataaagaaaatgctaacatagctttatctgttgctcagtctaagataatgcaaggtgtgaaaaaaaatataattaaattaaataccgcctcaagaaaaatcagcagattatcaaggcaaataaaaagtttgaaagtaaataacactttatagtaatttaaataattgtaagtaatataatatggcagtaaaaattcgtttagctagaggcggtgctaaaaagcgtcctttttaccgtgtagtagtagctaacgcaacagcacctcgtgacggtgactttttagaaaaagtcggaacttatgatccaatgcttgcttcagataatagtgagcgtgttgttttaaaaaaagatcgtataaaatattggcttggcaccggtgctaaaccaactgagcgagtcgcaaaatttattgagcaagcgggtgttactcttcctgagaaagttaaaaaggaaatggaagtgaaagcaaaaaaccgcaaagctagactaagtaaaaaggaagctaaagaagcttagtttatagtgctaatactacgagaagaatatgtcaataaaactaaaacaacgatttgttccacaacttgcagcaatgaatcacgaatttgcggaagatttctctaaaatgcttgaaaccgttgatacaagtcatataaaagaaaaaacggtagttaaaggtcaagtaatcgaaataaaaaacgatataattattgttgacgttggattaaaaaatgaaggtagaatacctaagtctgaatttttagctttacctgaagttggggacgtagtcgaagttttcatcgagaaaattgaaggacgtaacggcagaacaatattgagccgtgaaaaagcagttaaagaagaattatggggacaactagaaatcatgtgttccaagggcgaatttgtcgacggtacgattttcggtcgtgtaaaaggaggctttaccgtggatttatccggtgtagtagcattcttaccgggaagccaagttgacgttagacctattaaagatcctacttctataatgaatatcaagcaaccgtttaaaattttaagtatggataaaaagcttggtaatatagtagtttcaagaagagctattttagaagaatcacgttccgaagctagagatgagatgctatctaaaattaaagaaggcatggtattagaaggaaccgtaaaaaatattactgattacggtgcgtttatcgatcttggaagtgttgacggtttattacatttaaccgatatttcttggggaagagttaaccatccttcagaagtgttagactttaaccaaaaggttaaagtaatggttattaagtttgatgaaaaaacaaaaagaatatcactcggtataaaacaacttgattctaacccatgggaagcaattaaagaagaattccccgtcggtaaacaaatgaccggtaaagttacaaattttgctgattacggcgtatttatagaattaaaagacgggcttgagggacttgttcattcaagcgaaattagttggttaaaatctaatcaaaatcctagaaaaacgctaactatagggcaagaagtagacttcgtagttttagaggtcgatactgaaaagcatcgtgtttctttaagtattaaacaatgccaagaaaatcctttaacaaagttcgctgaaaataatcctgtcggtactataattaaagcacctattagaaatattacggatttcggtatttttgttgcactcggtaataatatggacggcatgattcatgaaggtgatattagctgggaagataaaggaacggatctattaaaatcatacaaaaaaggtgacgaaatagaatgcaaagttctagccattaatattgaaaaagaacaagttagtttaggtataaaacaattgtcgccgaatccatatcaagaaatcagtgatgaatataaaaaaggcaccatagttaaagcccttataacagaagttaaagatgagggactcgaagtattattaaacgataaagtagcaggttttattaaaagaactgaactatcggatgaaaaagacgagcagaagcctgaaatgtttcaaatagacaaagaaatagaagccaaagttgtttctatcgagaaatcaaccggtagaattttattatcggtaaaagctcataaaatagcagaacgtcaaaaagctctcaaagaatatggttctagtgataatactaccaatatgggagatatacttgctaatgctttagaagataagaagtaataatctatacttaattaacggcactcctcagccaagtcaaaagcctccggtcggaggcttttgactacatgcccatggcgtttacgccccgccctgccactcatcgcagtactgttgtaattcattaagcattctgccgacatggaagccatcacaaacggcatgatgaacctgaatcgccagcggcatcagcaccttgtcgccttgcgtataatatttgcccatagtgaaaacgggggcgaagaagttgtccatattggccacgtttaaatcaaaactggtgaaactcacccagggattggctgagacgaaaaacatattctcaataaaccctttagggaaataggccaggttttcaccgtaacacgccacatcttgcgaatatatgtgtagaaactgccggaaatcgtcgtggtattcactccagagcgatgaaaacgtttcagtttgctcatggaaaacggtgtaacaagggtgaacactatcccatatcaccagctcaccgtctttcattgccatacggaactccggatgagcattcatcaggcgggcaagaatgtgaataaaggccggataaaacttgtgcttatttttctttacggtctttaaaaaggccgtaatatccagctgaacggtctggttataggtacattgagcaactgactgaaatgcctcaaaatgttctttacgatgccattgggatatatcaacggtggtatatccagtgatttttttctccattttagcttccttagctcctgaaaatctcgataactcaaaaaatacgcccggtagtgatcttatttcattatggtgaaagttggaacctcttacgtgccaagccaaataggccgt

SEQ ID NO: 280 - DNA, 4141 bp, Artificial
  Synthetic
tcagatccttccgtatttagccagtatgttctctagtgtggttcgttgtttttgcgtgagccatgagaacgaaccattgagatcatgcttactttgcatgtcactcaaaaattttgcctcaaaactggtgagctgaatttttgcagttaaagcatcgtgtagtgtttttcttagtccgttacgtaggtaggaatctgatgtaatggttgttggtattttgtcaccattcatttttatctggttgttctcaagttcggttacgagatccatttgtctatctagttcaacttggaaaatcaacgtatcagtcgggcggcctcgcttatcaaccaccaatttcatattgctgtaagtgtttaaatctttacttattggtttcaaaacccattggttaagccttttaaactcatggtagttattttcaagcattaacatgaacttaaattcatcaaggctaatctctatatttgccttgtgagttttcttttgtgttagttcttttaataaccactcataaatcctcatagagtatttgttttcaaaagacttaacatgttccagattatattttatgaatttttttaactggaaaagataaggcaatatctcttcactaaaaactaattctaatttttcgcttgagaacttggcatagtttgtccactggaaaatcttaaagcctttaaccaaaggattcctgatttccacagttctcgtcatcagctctctggttgctttagctaatacaccataagcattttccctactgatgttcatcatctgagcgtattggttataagtgaacgataccgtccgttctttccttgtagggttttcaatcgtggggttgagtagtgccacacagcataaaattagcttggtttcatgctccgttaagtcatagcgactaatcgctagttcatttgctttgaaaacaactaattcagacatacatctcaattggtctaggtgattttaatcactataccaattgagatgggctagtcaatgataattactagtccttttcctttgagttgtgggtatctgtaaattctgctagacctttgctggaaaacttgtaaattctgctagaccctctgtaaattccgctagacctttgtgtgttttttttgtttatattcaagtggttataatttatagaataaagaaagaataaaaaaagataaaaagaatagatcccagccctgtgtataactcactactttagtcagttccgcagtattacaaaaggatgtcgcaaacgctgtttgctcctctacaaaacagaccttaaaaccctaaaggcttaagtagcaccctcgcaagctcgggcaaatcgctgaatattccttttgtctccgaccatcaggcacctgagtcgctgtctttttcgtgacattcagttcgctgcgctcacggctctggcagtgaatgggggtaaatggcactacaggcgccttttatggattcatgcaaggaaactacccataatacaagaaaagcccgtcacgggcttctcagggcgttttatggcgggtctgctatgtggtgctatctgactttttgctgttcagcagttcctgccctctgattttccagtctgaccacttcggattatcccgtgacaggtcattcagactggctaatgcacccagtaaggcagcggtatcatcaacaggcttacccgtcttactgtcaagaggacatccggtcaaataaaacgaaaggctcagtcgaaagactgggcctttcgttttgctgaggagacttagggaccctttatgacaacttgacggctacatcattcactttttcttcacaaccggcacggaactcgctcgggctggccccggtgcattttttaaatacccgcgagaaatagagttgatcgtcaaaaccaacattgcgaccgacggtggcgataggcatccgggtggtgctcaaaagcagcttcgcctggctgatacgttggtcctcgcgccagcttaagacgctaatccctaactgctggcggaaaagatgtgacagacgcgacggcgacaagcaaacatgctgtgcgacgctggcgatatcaaaattgctgtctgccaggtgatcgctgatgtactgacaagcctcgcgtacccgattatccatcggtggatggagcgactcgttaatcgcttccatgcgccgcagtaacaattgctcaagcagatttatcgccagcagctccgaatagcgcccttccccttgcccggcgttaatgatttgcccaaacaggtcgctgaaatgcggctggtgcgcttcatccgggcgaaagaaccccgtattggcaaatattgacggccagttaagccattcatgccagtaggcgcgcggacgaaagtaaacccactggtgataccattcgcgagcctccggatgacgaccgtagtgatgaatctctcctggcgggaacagcaaaatatcacccggtcggcaaacaaattctcgtccctgatttttcaccaccccctgaccgcgaatggtgagattgagaatataacctttcattcccagcggtcggtcgataaaaaaatcgagataaccgttggcctcaatcggcgttaaacccgccaccagatgggcattaaacgagtatcccggcagcaggggatcattttgcgcttcagccatacttttcatactcccaccattcagagaagaaaccaattgtccatattgcatcagacattgccgtcactgcgtcttttactggctcttctcgctaacccaaccggtaaccccgcttattaaaagcattctgtaacaaagcgggaccaaagccatgacaaaaacgcgtaacaaaagtgtctataatcacggcagaaaagtccacattgattatttgcacggcgtcacactttgctatgccatagcatttttatccataagattagcggatcctacctgacgctttttatcgcaactctctactgtttctccatacccgttttacctgcaggtgcagtcaaaactccaaggagttatcgtggccaacatcaagtctgcccagaagcgtgcgcttcaatccgaaaaacgtcgtctgcacaacaacagcctacgttctaaagtacgtaccagcatcaagcgtgtacttaaagaagtacaaactggtgactgggaaaaagctatggctgctttccaagctgcacagccagttattgatcgcattgctgacaagggtgttttcaacaagaactgggctgctcgtactaagagccgtctgaacgctcgtgttaaagcacttaaagcttcctaagttttaggacttaattaacggcactcctcagccaagtcaaaagcctccggtcggaggcttttgactacatgcccatggcgtttacgccccgccctgccactcatcgcagtactgttgtaattcattaagcattctgccgacatggaagccatcacaaacggcatgatgaacctgaatcgccagcggcatcagcaccttgtcgccttgcgtataatatttgcccatagtgaaaacgggggcgaagaagttgtccatattggccacgtttaaatcaaaactggtgaaactcacccagggattggctgagacgaaaaacatattctcaataaaccctttagggaaataggccaggttttcaccgtaacacgccacatcttgcgaatatatgtgtagaaactgccggaaatcgtcgtggtattcactccagagcgatgaaaacgtttcagtttgctcatggaaaacggtgtaacaagggtgaacactatcccatatcaccagctcaccgtctttcattgccatacggaactccggatgagcattcatcaggcgggcaagaatgtgaataaaggccggataaaacttgtgcttatttttctttacggtctttaaaaaggccgtaatatccagctgaacggtctggttataggtacattgagcaactgactgaaatgcctcaaaatgttctttacgatgccattgggatatatcaacggtggtatatccagtgatttttttctccattttagcttccttagctcctgaaaatctcgataactcaaaaaatacgcccggtagtgatcttatttcattatggtgaaagttggaacctcttacgtgccaagccaaataggccgt

SEQ ID NO: 281 - DNA, 6321 bp, Artificial
  Synthetic
tcagatccttccgtatttagccagtatgttctctagtgtggttcgttgtttttgcgtgagccatgagaacgaaccattgagatcatgcttactttgcatgtcactcaaaaattttgcctcaaaactggtgagctgaatttttgcagttaaagcatcgtgtagtgtttttcttagtccgttacgtaggtaggaatctgatgtaatggttgttggtattttgtcaccattcatttttatctggttgttctcaagttcggttacgagatccatttgtctatctagttcaacttggaaaatcaacgtatcagtcgggcggcctcgcttatcaaccaccaatttcatattgctgtaagtgtttaaatctttacttattggtttcaaaacccattggttaagccttttaaactcatggtagttattttcaagcattaacatgaacttaaattcatcaaggctaatctctatatttgccttgtgagttttcttttgtgttagttcttttaataaccactcataaatcctcatagagtatttgttttcaaaagacttaacatgttccagattatattttatgaatttttttaactggaaaagataaggcaatatctcttcactaaaaactaattctaatttttcgcttgagaacttggcatagtttgtccactggaaaatcttaaagcctttaaccaaaggattcctgatttccacagttctcgtcatcagctctctggttgctttagctaatacaccataagcattttccctactgatgttcatcatctgagcgtattggttataagtgaacgataccgtccgttctttccttgtagggttttcaatcgtggggttgagtagtgccacacagcataaaattagcttggtttcatgctccgttaagtcatagcgactaatcgctagttcatttgctttgaaaacaactaattcagacatacatctcaattggtctaggtgattttaatcactataccaattgagatgggctagtcaatgataattactagtccttttcctttgagttgtgggtatctgtaaattctgctagacctttgctggaaaacttgtaaattctgctagaccctctgtaaattccgctagacctttgtgtgttttttttgtttatattcaagtggttataatttatagaataaagaaagaataaaaaaagataaaaagaatagatcccagccctgtgtataactcactactttagtcagttccgcagtattacaaaaggatgtcgcaaacgctgtttgctcctctacaaaacagaccttaaaaccctaaaggcttaagtagcaccctcgcaagctcgggcaaatcgctgaatattccttttgtctccgaccatcaggcacctgagtcgctgtctttttcgtgacattcagttcgctgcgctcacggctctggcagtgaatgggggtaaatggcactacaggcgccttttatggattcatgcaaggaaactacccataatacaagaaaagcccgtcacgggcttctcagggcgttttatggcgggtctgctatgtggtgctatctgactttttgctgttcagcagttcctgccctctgattttccagtctgaccacttcggattatcccgtgacaggtcattcagactggctaatgcacccagtaaggcagcggtatcatcaacaggcttacccgtcttactgtcaagaggacatccggtcaaataaaacgaaaggctcagtcgaaagactgggcctttcgttttgctgaggagacttagggaccctttatgacaacttgacggctacatcattcactttttcttcacaaccggcacggaactcgctcgggctggccccggtgcattttttaaatacccgcgagaaatagagttgatcgtcaaaaccaacattgcgaccgacggtggcgataggcatccgggtggtgctcaaaagcagcttcgcctggctgatacgttggtcctcgcgccagcttaagacgctaatccctaactgctggcggaaaagatgtgacagacgcgacggcgacaagcaaacatgctgtgcgacgctggcgatatcaaaattgctgtctgccaggtgatcgctgatgtactgacaagcctcgcgtacccgattatccatcggtggatggagcgactcgttaatcgcttccatgcgccgcagtaacaattgctcaagcagatttatcgccagcagctccgaatagcgcccttccccttgcccggcgttaatgatttgcccaaacaggtcgctgaaatgcggctggtgcgcttcatccgggcgaaagaaccccgtattggcaaatattgacggccagttaagccattcatgccagtaggcgcgcggacgaaagtaaacccactggtgataccattcgcgagcctccggatgacgaccgtagtgatgaatctctcctggcgggaacagcaaaatatcacccggtcggcaaacaaattctcgtccctgatttttcaccaccccctgaccgcgaatggtgagattgagaatataacctttcattcccagcggtcggtcgataaaaaaatcgagataaccgttggcctcaatcggcgttaaacccgccaccagatgggcattaaacgagtatcccggcagcaggggatcattttgcgcttcagccatacttttcatactcccaccattcagagaagaaaccaattgtccatattgcatcagacattgccgtcactgcgtcttttactggctcttctcgctaacccaaccggtaaccccgcttattaaaagcattctgtaacaaagcgggaccaaagccatgacaaaaacgcgtaacaaaagtgtctataatcacggcagaaaagtccacattgattatttgcacggcgtcacactttgctatgccatagcatttttatccataagattagcggatcctacctgacgctttttatcgcaactctctactgtttctccatacccgttttacctgcaggtgcagtctcataaacaggcgcagccattgggctgcaaggagatagacaacgtggcaaatcatgtatccgcactgaaacgtgcccgccaggatcaaaagaaacgtattcagaatcgtgcccagaagtcggctatgcgtactgccgtcaagcaggtgctggtggctgtagaggcaggagacaagcaggctgcatccgatgcgctgaagcaggcgacgtccttgcttgaccgtgccggccgcaagaaccagatgcatccgcgtcaggcttcccgccgtgtttcccgcctgaatgcccatgttaaggctattggctaatatacctaatttttcggaggtaacaaatatggcaactgtgattcgcctgagccgtggtggacgcaagaagcgtcctttttattctgtagtcgtcatggacggccgcaagcgtcgtgatggcgcatttatcgagaagctcggttattttgatccgtgcaaagatcctgaagtgatccagctggaccttgagcgtgtgaaagcatggaccgatcagggtgcccaggtatccgatcgcgtggctagcctgatcgccaaggcatccgcgtaatcagcttgagtcattaggatggtacaccatgagtgaagccgagaagctcgacacgatacagaaagcagggggtgaggcggatgttgtcgataccgcttcagcaactgcagaggcaacccctgaggtcgtcgtagcagaaaccgaaaccactgcagcagcacctgctgcagaagagccggtcgtacaggccagtgaagagtcagatgagactcctgctgaagaggccgttagcgaagaggactctttcaggctgctgtacgaggcttccctgaaggagaaaggcgagattcgcaagggtgagatggtcaccggcatggtggtgggcctgaatgccgatgttgtcgtcattgacgtagggaccaaggccgaaggcacgattccgctggctgaattcgagcaggccgggctgccggttccggcaatcggcacagaaatcaaggcattgatccagtcggttggcggctcttcgggtgtgagcttgtccgtgctggccatcagacagcgcgaggcatgggatgccattgaagcggctgtggccgatgagagtacggtggatgcggtcatcacatcggaagtcaagggcggttaccgggtcagcctgagcgggttgaatgcatttatgccgcgctccgaagcggatacggatatccatgtcctgccggctaatctgattggtaaggcatgcaaggtggctgtactggaagcgcggcgcaggccggaaaatattgttgtatcacgcaggcgtccgttgactgccgctctggaagtcgagcgcgcggccttcttcgcacagcatgcggtgggtgacaggctgagcggtgaagtgaagcggctggctgatttcggtgcttttgtcgatatcggtggtgtggatgcattgctgcacgtatccgatgtgtcgtggcgccggatcaagcacccgtcggagatgctcagcgtcggtcagagcgtgagtgttgagatcgtcaagttgaatgcggaaaccgggaaagtgtcggtgtctatgaaggcactgcagtcggatccgtgggataatgtagaagcaatctatgagccgggcatggggctgaccggcaccgtgcgccgcctgctcgatttcggtgctgttgtggagctggagcccggcattgagggtatgattcaccgttctgagctgagctggacaaatcgtgatgtgaatccggcggctgtgctggctgaaggtgatgtggtggatgtggtggtgctggaagttgatgcatcggcccgtcgtattcgtctgagcctgaaggctgtcagcgaaaatccgtggcagcagtggatggcagatcatccgattggcacgcatgtcagtggcaagatcaagaacatcactgacttcggtttctttgtgcatgtggctgatggtatggatggcctggtgcatatggagaacctctcctgggagaagtccggagcggctgctatggagccttacagcaagggacaggaagtcgaagcggttgtgttgggcgtggatgttgaaaaacagcgcatcgcgctgggcatcaagcagctctcggccgatccgtttgaactgtttctggccggcgtcaagcgtggcaatagcgttaatggtaccgtggtcgatgtgaaacctgccggcgtggtcgtggagttggccgatggcgtacaggcattcatgccgatgcgtgaagtcccgcgcgatcacggcgaattgaaagtcggttccgaagtggaagcgaagattgtcgaagtgaataacaagcgtcgtcaggttacgctctccattcgtcagcatctgattcaggaagagcgggaggctatgcgcaactattcccgtcagaccgctgaggaatccgctccgtcggcactggcgctggagttgcagcgtaaactctttggcaagaagtaagccgatatacttaattaacggcactcctcagccaagtcaaaagcctccggtcggaggcttttgactacatgcccatggcgtttacgctccgccctgccactcatcgcagtactgttgtaattcattaagcattctgccgacatggaagccatcacaaacggcatgatgaacctgaatcgccagcggcatcagcaccttgtcgccttgcgtataatatttgcccatagtgaaaacgggggcgaagaagttgtccatattggccacgtttaaatcaaaactggtgaaactcacccagggattggctgagacgaaaaacatattctcaataaaccctttagggaaataggccaggttttcaccgtaacacgccacatcttgcgaatatatgtgtagaaactgccggaaatcgtcgtggtattcactccagagcgatgaaaacgtttcagtttgctcatggaaaacggtgtaacaagggtgaacactatcccatatcaccagctcaccgtctttcattgccatacggaactccggatgagcattcatcaggcgggcaagaatgtgaataaaggccggataaaacttgtgcttatttttctttacggtctttaaaaaggccgtaatatccagctgaacggtctggttataggtacattgagcaactgactgaaatgcctcaaaatgttctttacgatgccattgggatatatcaacggtggtatatccagtgatttttttctccattttagcttccttagctcctgaaaatctcgataactcaaaaaatacgcccggtagtgatcttatttcattatggtgaaagttggaacctcttacgtgccaagccaaataggccgt

SEQ ID NO: 282 - DNA, 6168 bp, Artificial
  Synthetic
tcagatccttccgtatttagccagtatgttctctagtgtggttcgttgtttttgcgtgagccatgagaacgaaccattgagatcatgcttactttgcatgtcactcaaaaattttgcctcaaaactggtgagctgaatttttgcagttaaagcatcgtgtagtgtttttcttagtccgttacgtaggtaggaatctgatgtaatggttgttggtattttgtcaccattcatttttatctggttgttctcaagttcggttacgagatccatttgtctatctagttcaacttggaaaatcaacgtatcagtcgggcggcctcgcttatcaaccaccaatttcatattgctgtaagtgtttaaatctttacttattggtttcaaaacccattggttaagccttttaaactcatggtagttattttcaagcattaacatgaacttaaattcatcaaggctaatctctatatttgccttgtgagttttcttttgtgttagttcttttaataaccactcataaatcctcatagagtatttgttttcaaaagacttaacatgttccagattatattttatgaatttttttaactggaaaagataaggcaatatctcttcactaaaaactaattctaatttttcgcttgagaacttggcatagtttgtccactggaaaatcttaaagcctttaaccaaaggattcctgatttccacagttctcgtcatcagctctctggttgctttagctaatacaccataagcattttccctactgatgttcatcatctgagcgtattggttataagtgaacgataccgtccgttctttccttgtagggttttcaatcgtggggttgagtagtgccacacagcataaaattagcttggtttcatgctccgttaagtcatagcgactaatcgctagttcatttgctttgaaaacaactaattcagacatacatctcaattggtctaggtgattttaatcactataccaattgagatgggctagtcaatgataattactagtccttttcctttgagttgtgggtatctgtaaattctgctagacctttgctggaaaacttgtaaattctgctagaccctctgtaaattccgctagacctttgtgtgttttttttgtttatattcaagtggttataatttatagaataaagaaagaataaaaaaagataaaaagaatagatcccagccctgtgtataactcactactttagtcagttccgcagtattacaaaaggatgtcgcaaacgctgtttgctcctctacaaaacagaccttaaaaccctaaaggcttaagtagcaccctcgcaagctcgggcaaatcgctgaatattccttttgtctccgaccatcaggcacctgagtcgctgtctttttcgtgacattcagttcgctgcgctcacggctctggcagtgaatgggggtaaatggcactacaggcgccttttatggattcatgcaaggaaactacccataatacaagaaaagcccgtcacgggcttctcagggcgttttatggcgggtctgctatgtggtgctatctgactttttgctgttcagcagttcctgccctctgattttccagtctgaccacttcggattatcccgtgacaggtcattcagactggctaatgcacccagtaaggcagcggtatcatcaacaggcttacccgtcttactgtcaagaggacatccggtcaaataaaacgaaaggctcagtcgaaagactgggcctttcgttttgctgaggagacttagggaccctttatgacaacttgacggctacatcattcactttttcttcacaaccggcacggaactcgctcgggctggccccggtgcattttttaaatacccgcgagaaatagagttgatcgtcaaaaccaacattgcgaccgacggtggcgataggcatccgggtggtgctcaaaagcagcttcgcctggctgatacgttggtcctcgcgccagcttaagacgctaatccctaactgctggcggaaaagatgtgacagacgcgacggcgacaagcaaacatgctgtgcgacgctggcgatatcaaaattgctgtctgccaggtgatcgctgatgtactgacaagcctcgcgtacccgattatccatcggtggatggagcgactcgttaatcgcttccatgcgccgcagtaacaattgctcaagcagatttatcgccagcagctccgaatagcgcccttccccttgcccggcgttaatgatttgcccaaacaggtcgctgaaatgcggctggtgcgcttcatccgggcgaaagaaccccgtattggcaaatattgacggccagttaagccattcatgccagtaggcgcgcggacgaaagtaaacccactggtgataccattcgcgagcctccggatgacgaccgtagtgatgaatctctcctggcgggaacagcaaaatatcacccggtcggcaaacaaattctcgtccctgatttttcaccaccccctgaccgcgaatggtgagattgagaatataacctttcattcccagcggtcggtcgataaaaaaatcgagataaccgttggcctcaatcggcgttaaacccgccaccagatgggcattaaacgagtatcccggcagcaggggatcattttgcgcttcagccatacttttcatactcccaccattcagagaagaaaccaattgtccatattgcatcagacattgccgtcactgcgtcttttactggctcttctcgctaacccaaccggtaaccccgcttattaaaagcattctgtaacaaagcgggaccaaagccatgacaaaaacgcgtaacaaaagtgtctataatcacggcagaaaagtccacattgattatttgcacggcgtcacactttgctatgccatagcatttttatccataagattagcggatcctacctgacgctttttatcgcaactctctactgtttctccatacccgttttacctgcaggtgcagtggacaggataaggaaccgtcatggctaactccgcacaagcacgcaagcgcgcccgccaggccgcgaaggcaaactcgcacaactcggcgctgcgctcgaaattccgtaccgcgatcaagtcggttcgcaaggctgttgaagccggcgaccaggcaaaggctgccgagctgttcaaggctgccgtgaagacgatcgacacgatcgccgacaagaagatcgttcacaagaacaaggccgctcgcagcaagagccgcctggccgcagccgtcaagggcctgcaggcagcagcgtaactccggtggttttcccgaaggacatcatatggttatcatccgtctggctcgtggcggctcgaagaagcgcccgttctacaacatcgttgctaccgattcgcgcaaccgtcgtgacggccgcttcatcgagcgcgtcggcttctacaacccggtcgccacgaagggcgaatcgctgcgtatcgctcaggatcgcctgacgtactggcaaggcgttggcgcgcaactgtcgccgaccgtccagcgtctcgtgaaggaagcgcaaaaggcgcaaccggctgcctaacatggcacccatgcacaatcagatttttatgtccgacctgcaaacctccaccccgaataccgaatcctttgcggctctgttcgaagagtcgctgacccgccaagacatgcgcgccggcgaagtgatttccgccgaagtcgtgcgcgtcgaccacaacttcgtggtcgtcaatgcaggcctgaagtccgaggcttacattccgatcgaggaattcctgaacgatcagggcgaggttgaggtgcagtcgggcgatttcgtgtccgtcgcgatcgacgcactcgaaaacggctatggcgacacgatcctgtcgcgcgacaaggcgaagcgccttgcatcgtggctgtcgctggaaaaggcgctcgacaacaacgagctcgtcaccggcacgatcaccggcaaggtgaagggcggcatgaccgtgatggtcaacggcatccgcgcgttcctgccgggttcgctggtcgacacgcgtccggtcaaggacacgaccccgtacgaaggcaagacgctcgagttccgcgtgatcaagctcgatcgcaagcgtaacaacgtcgtgctgtcgcgtcgtgcagtgatcgaagcaacgcaaggcgaagagcgcgcgaagctgctcgagacgctgaaggaaggcgcgatcgtcaacggcgtggtcaagaacatcaccgactacggcgcgttcgtcgacctcggcggtatcgacggcctgctgcacatcaccgacatcgcatggcgtcgtgtgcgtcacccgagcgaagtcctgtcggttggccaggaagtcaccgcgaagatcctcaagttcgaccaagagaagaaccgcgtctcgctgggcatcaagcaactgggcgacgatccgtgggaaggcatctcgcgccgttacccgtcgggcacgcgcctgttcggcaaggtcacgaacatcaccgactacggcgcattcgtcgaagtggaatcgggcatcgaaggcctcgtccacgtgtcggaaatggactggaccaacaagaacgttgcgccgtcgaaggttgtccagctgggcgacgaagtcgaagtcatggtcctcgagatcgacgaagaccgtcgtcgtatcagcctcggcatgaagcagtgcaagccgaatccgtgggatgacttcagccgcaacttcaagaagggcgacaagatcacgggcgcaatcaagtcgatcaccgacttcggcgtgttcatcggtctgccgggcggcatcgacggcttggtccacctgtcggacctgtcgtggagcgaagccggcgaagaagccgttcgcaagtacaagaagggcgacgaagtcgaagcaatcgtgctcggtatcgacgtcgagaaggagcgcatttcgctcggcatcaagcagctcgaaggcgacccgttcagcaactacgttgcaatgaacgacaagggctcgatcgtcgacggcgtcgtgaagacggtcgatgcgaagggtgcggtcgtcacgctgacgggcgacatcgaaggctacctgcgtgcgtcggaaatctcgcaggatcgcgtcgaagatgcacgcaacgtgctgaaggaaggcgacaaggtcaacgcgatggtgatcaacatcgatcgcaagtcgcgcggcatcaacctgtcgatcaaggcgaaggattcggccgaacaacaggaagcgatccgcggcctgcagtcggactccagcgctgctgcgaccggtacgaccaacctcggcgcgctgctgaaggcgaagctcgacggccagaaccagtaagccttacgacttaattaacggcactcctcagccaagtcaaaagcctccggtcggaggcttttgactacatgcccatggcgtttacgccccgccctgccactcatcgcagtactgttgtaattcattaagcattctgccgacatggaagccatcacaaacggcatgatgaacctgaatcgccagcggcatcagcaccttgtcgccttgcgtataatatttgcccatagtgaaaacgggggcgaagaagttgtccatattggccacgtttaaatcaaaactggtgaaactcacccagggattggctgagacgaaaaacatattctcaataaaccctttagggaaataggccaggttttcaccgtaacacgccacatcttgcgaatatatgtgtagaaactgccggaaatcgtcgtggtattcactccagagcgatgaaaacgtttcagtttgctcatggaaaacggtgtaacaagggtgaacactatcccatatcaccagctcaccgtctttcattgccatacggaactccggatgagcattcatcaggcgggcaagaatgtgaataaaggccggataaaacttgtgcttatttttctttacggtctttaaaaaggccgtaatatccagctgaacggtctggttataggtacattgagcaactgactgaaatgcctcaaaatgttctttacgatgccattgggatatatcaacggtggtatatccagtgatttttttctccattttagcttccttagctcctgaaaatctcgataactcaaaaaatacgcccggtagtgatcttatttcattatggtgaaagttggaacctcttacgtgccaggccaaataggccgt

SEQ ID NO: 283 - DNA, 6108 bp, Artificial
  Synthetic
tcagatccttccgtatttagccagtatgttctctagtgtggttcgttgtttttgcgtgagccatgagaacgaaccattgagatcatgcttactttgcatgtcactcaaaaattttgcctcaaaactggtgagctgaatttttgcagttaaagcatcgtgtagtgtttttcttagtccgttacgtaggtaggaatctgatgtaatggttgttggtattttgtcaccattcatttttatctggttgttctcaagttcggttacgagatccatttgtctatctagttcaacttggaaaatcaacgtatcagtcgggcggcctcgcttatcaaccaccaatttcatattgctgtaagtgtttaaatctttacttattggtttcaaaacccattggttaagccttttaaactcatggtagttattttcaagcattaacatgaacttaaattcatcaaggctaatctctatatttgccttgtgagttttcttttgtgttagttcttttaataaccactcataaatcctcatagagtatttgttttcaaaagacttaacatgttccagattatattttatgaatttttttaactggaaaagataaggcaatatctcttcactaaaaactaattctaatttttcgcttgagaacttggcatagtttgtccactggaaaatcttaaagcctttaaccaaaggattcctgatttccacagttctcgtcatcagctctctggttgctttagctaatacaccataagcattttccctactgatgttcatcatctgagcgtattggttataagtgaacgataccgtccgttctttccttgtagggttttcaatcgtggggttgagtagtgccacacagcataaaattagcttggtttcatgctccgttaagtcatagcgactaatcgctagttcatttgctttgaaaacaactaattcagacatacatctcaattggtctaggtgattttaatcactataccaattgagatgggctagtcaatgataattactagtccttttcctttgagttgtgggtatctgtaaattctgctagacctttgctggaaaacttgtaaattctgctagaccctctgtaaattccgctagacctttgtgtgttttttttgtttatattcaagtggttataatttatagaataaagaaagaataaaaaaagataaaaagaatagatcccagccctgtgtataactcactactttagtcagttccgcagtattacaaaaggatgtcgcaaacgctgtttgctcctctacaaaacagaccttaaaaccctaaaggcttaagtagcaccctcgcaagctcgggcaaatcgctgaatattccttttgtctccgaccatcaggcacctgagtcgctgtctttttcgtgacattcagttcgctgcgctcacggctctggcagtgaatgggggtaaatggcactacaggcgccttttatggattcatgcaaggaaactacccataatacaagaaaagcccgtcacgggcttctcagggcgttttatggcgggtctgctatgtggtgctatctgactttttgctgttcagcagttcctgccctctgattttccagtctgaccacttcggattatcccgtgacaggtcattcagactggctaatgcacccagtaaggcagcggtatcatcaacaggcttacccgtcttactgtcaagaggacatccggtcaaataaaacgaaaggctcagtcgaaagactgggcctttcgttttgctgaggagacttagggaccctttatgacaacttgacggctacatcattcactttttcttcacaaccggcacggaactcgctcgggctggccccggtgcattttttaaatacccgcgagaaatagagttgatcgtcaaaaccaacattgcgaccgacggtggcgataggcatccgggtggtgctcaaaagcagcttcgcctggctgatacgttggtcctcgcgccagcttaagacgctaatccctaactgctggcggaaaagatgtgacagacgcgacggcgacaagcaaacatgctgtgcgacgctggcgatatcaaaattgctgtctgccaggtgatcgctgatgtactgacaagcctcgcgtacccgattatccatcggtggatggagcgactcgttaatcgcttccatgcgccgcagtaacaattgctcaagcagatttatcgccagcagctccgaatagcgcccttccccttgcccggcgttaatgatttgcccaaacaggtcgctgaaatgcggctggtgcgcttcatccgggcgaaagaaccccgtattggcaaatattgacggccagttaagccattcatgccagtaggcgcgcggacgaaagtaaacccactggtgataccattcgcgagcctccggatgacgaccgtagtgatgaatctctcctggcgggaacagcaaaatatcacccggtcggcaaacaaattctcgtccctgatttttcaccaccccctgaccgcgaatggtgagattgagaatataacctttcattcccagcggtcggtcgataaaaaaatcgagataaccgttggcctcaatcggcgttaaacccgccaccagatgggcattaaacgagtatcccggcagcaggggatcattttgcgcttcagccatacttttcatactcccaccattcagagaagaaaccaattgtccatattgcatcagacattgccgtcactgcgtcttttactggctcttctcgctaacccaaccggtaaccccgcttattaaaagcattctgtaacaaagcgggaccaaagccatgacaaaaacgcgtaacaaaagtgtctataatcacggcagaaaagtccacattgattatttgcacggcgtcacactttgctatgccatagcatttttatccataagattagcggatcctacctgacgctttttatcgcaactctctactgtttctccatacccgttttacctgcaggtgcagtagtttttgggagttagacccttggcaaataacaaatctgctaagaagcgcgctatccaagctgagaaacgtcgccagcacaatgctagccgtcgttctatgatgcgcacttacatgaagaaaactgttgctgcaatcgctgctggcgacaaagaagctgcaactgctgcattcgctgtagttacaccaatcctagaccgcatggcgactaaaggccttattcacaagaataaagcagctcgtcacaagtctcgcttctttgctgctatcaacgctctgtaatagagttttgaaatgcaaagaggacgacatggtaaccattcgtttggcacgtcacggcgcgaaaaagcgtccattctatcaaatcgttgtagctgacagccgcaactcagcaactggccgtttcatcgagaaagtaggtttctttaaccctactgctactggtcaagaagaaggcctgcgtctagacctagatcgcgtgaaccactgggtttcacaaggcgcatctctgtctgatcgcgtagcacagctagttaaaaccgctcaaaaagcggcttaattattactaattattgaagattaaataaatgactgaatcttttgctcaactctttgaagagtttctgaacgagacccaattccaacaaggtactatcgttaaaggtactgtagtagcaatcgagaacggctacgttctggttgatgctggcctgaagtctgagtctgctatccctgctgaacaattcaagaacgctgctggcgaactagaagttcaagtcggttctcaagtagacgtagctctggacgcggttgaagatggtttcggcgaaactcaactttctcgtgagaaagcgaagcgccatgaagcttggatcgtacttgaaaaagcttacgaagaagctgcaactgttatcggtatcattaacggtaaagttaaaggtggtttcactgttgaactgaacggtatccgtgcgttcctgccaggttctctggttgacgtacgtccaatccgtgacactgctcacttagaaaacaaagagctagagttcaaagttatcaagctagaccagaagcgtaacaacgttgttgtttctcgtcgtgcagttatcgaatctgaaagcagcgtagagcgtgatgaactgcttgaaactctgcaagaaggtactgaagttaaaggtatcgttaagaacctgactgactacggtgcgttcgttgatctgggcggcgttgacggtctgctacacatcactgacatggcttggaagcgcgttaagcatccatcagaaatcgttaacgttggtgacgagatcctagttaaagtactgaagttcgatcgtgatcgtactcgcgtatctctaggtctgaaacagctaggcgaagatccatgggtagcaatcgctaagcgttacccagaaggtcacaaactgtctggccgtgtaactaacctgactgactacggctgcttcgttgaaatcgaagaaggcgttgaaggtctagtacacgtttctgaaatggactggacgaacaagaacatccacccatctaaagttgttaatgttggcgacgaagttgaggttatggttctggatatcgacgaagagcgtcgtcgtatctctctaggcctgaaacagtgtaaagctaacccatggcaatcattcgctgaagcgcaagctaaaggcgacaaagtaactggtaagatcaagtctatcactgactttggtatcttcatcggtctagaaggcggtatcgacggtctggttcacctgtctgacatctcttggaacgtaccaggagaagaagctgttcgtgaattcaagaaaggcgacgaaatctctgcagttgttctagcagtagacgctgagcgtgagcgtatttctctgggcatcaagcaaatggaaaacgatccattcaacgcttatgtttcagacaacaagaaaggtgctctggttaacggtactgtaactgcagttgacgcgaaaggcgcaaccatcgagctagaagacggcgttgaaggttacatccgcgcttctgaagtatcacgtgaccgtatcgaagatgcatcactgatcctgaacgttggtgacaaagttgaagcgaaatttactggtgttgaccgtaaaaaccgcgtaatcaacctgtctatcaaagcgaaagatgaagctgaagagcaagaagtaatggcaactctgaacaagcaagatgaagctgcgttcggtaatgctatggctgacgctttcaaagcagcgaaaggcgaataatagccaaaacttaattaacggcactcctcagccaagtcaaaagcctccggtcggaggcttttgactacatgcccatggcgtttacgccccgccctgccactcatcgcagtactgttgtaattcattaagcattctgccgacatggaagccatcacaaacggcatgatgaacctgaatcgccagcggcatcagcaccttgtcgccttgcgtataatatttgcccatagtgaaaacgggggcgaagaagttgtccatattggccacgtttaaatcaaaactggtgaaactcacccagggattggctgagacgaaaaacatattctcaataaaccctttagggaaataggccaggttttcaccgtaacacgccacatcttgcgaatatatgtgtagaaactgccggaaatcgtcgtggtattcactccagagcgatgaaaacgtttcagtttgctcatggaaaacggtgtaacaagggtgaacactatcccatatcaccagctcaccgtctttcattgccatacggaactccggatgagcattcatcaggcgggcaagaatgtgaataaaggccggataaaacttgtgcttatttttctttacggtctttaaaaaggccgtaatatccagctgaacggtctggttataggtacattgagcaactgactgaaatgcctcaaaatgttctttacgatgccattgggatatatcaacggtggtatatccagtgatttttttctccattttagcttccttagctcctgaaaatctcgataactcaaaaaatacgcccggtagtgatcttatttcattatggtgaaagttggaacctcttacgtgccaggccaaataggccgt

SEQ ID NO: 284 - DNA, 4135 bp, Artificial
  Synthetic
tcagatccttccgtatttagccagtatgttctctagtgtggttcgttgtttttgcgtgagccatgagaacgaaccattgagatcatgcttactttgcatgtcactcaaaaattttgcctcaaaactggtgagctgaatttttgcagttaaagcatcgtgtagtgtttttcttagtccgttacgtaggtaggaatctgatgtaatggttgttggtattttgtcaccattcatttttatctggttgttctcaagttcggttacgagatccatttgtctatctagttcaacttggaaaatcaacgtatcagtcgggcggcctcgcttatcaaccaccaatttcatattgctgtaagtgtttaaatctttacttattggtttcaaaacccattggttaagccttttaaactcatggtagttattttcaagcattaacatgaacttaaattcatcaaggctaatctctatatttgccttgtgagttttcttttgtgttagttcttttaataaccactcataaatcctcatagagtatttgttttcaaaagacttaacatgttccagattatattttatgaatttttttaactggaaaagataaggcaatatctcttcactaaaaactaattctaatttttcgcttgagaacttggcatagtttgtccactggaaaatcttaaagcctttaaccaaaggattcctgatttccacagttctcgtcatcagctctctggttgctttagctaatacaccataagcattttccctactgatgttcatcatctgagcgtattggttataagtgaacgataccgtccgttctttccttgtagggttttcaatcgtggggttgagtagtgccacacagcataaaattagcttggtttcatgctccgttaagtcatagcgactaatcgctagttcatttgctttgaaaacaactaattcagacatacatctcaattggtctaggtgattttaatcactataccaattgagatgggctagtcaatgataattactagtccttttcctttgagttgtgggtatctgtaaattctgctagacctttgctggaaaacttgtaaattctgctagaccctctgtaaattccgctagacctttgtgtgttttttttgtttatattcaagtggttataatttatagaataaagaaagaataaaaaaagataaaaagaatagatcccagccctgtgtataactcactactttagtcagttccgcagtattacaaaaggatgtcgcaaacgctgtttgctcctctacaaaacagaccttaaaaccctaaaggcttaagtagcaccctcgcaagctcgggcaaatcgctgaatattccttttgtctccgaccatcaggcacctgagtcgctgtctttttcgtgacattcagttcgctgcgctcacggctctggcagtgaatgggggtaaatggcactacaggcgccttttatggattcatgcaaggaaactacccataatacaagaaaagcccgtcacgggcttctcagggcgttttatggcgggtctgctatgtggtgctatctgactttttgctgttcagcagttcctgccctctgattttccagtctgaccacttcggattatcccgtgacaggtcattcagactggctaatgcacccagtaaggcagcggtatcatcaacaggcttacccgtcttactgtcaagaggacatccggtcaaataaaacgaaaggctcagtcgaaagactgggcctttcgttttgctgaggagacttagggaccctttatgacaacttgacggctacatcattcactttttcttcacaaccggcacggaactcgctcgggctggccccggtgcattttttaaatacccgcgagaaatagagttgatcgtcaaaaccaacattgcgaccgacggtggcgataggcatccgggtggtgctcaaaagcagcttcgcctggctgatacgttggtcctcgcgccagcttaagacgctaatccctaactgctggcggaaaagatgtgacagacgcgacggcgacaagcaaacatgctgtgcgacgctggcgatatcaaaattgctgtctgccaggtgatcgctgatgtactgacaagcctcgcgtacccgattatccatcggtggatggagcgactcgttaatcgcttccatgcgccgcagtaacaattgctcaagcagatttatcgccagcagctccgaatagcgcccttccccttgcccggcgttaatgatttgcccaaacaggtcgctgaaatgcggctggtgcgcttcatccgggcgaaagaaccccgtattggcaaatattgacggccagttaagccattcatgccagtaggcgcgcggacgaaagtaaacccactggtgataccattcgcgagcctccggatgacgaccgtagtgatgaatctctcctggcgggaacagcaaaatatcacccggtcggcaaacaaattctcgtccctgatttttcaccaccccctgaccgcgaatggtgagattgagaatataacctttcattcccagcggtcggtcgataaaaaaatcgagataaccgttggcctcaatcggcgttaaacccgccaccagatgggcattaaacgagtatcccggcagcaggggatcattttgcgcttcagccatacttttcatactcccaccattcagagaagaaaccaattgtccatattgcatcagacattgccgtcactgcgtcttttactggctcttctcgctaacccaaccggtaaccccgcttattaaaagcattctgtaacaaagcgggaccaaagccatgacaaaaacgcgtaacaaaagtgtctataatcacggcagaaaagtccacattgattatttgcacggcgtcacactttgctatgccatagcatttttatccataagattagcggatcctacctgacgctttttatcgcaactctctactgtttctccatacccgttttacctgcaggtgcagttttattttgggagttacaccttggctaacattaagtctgctaagaagcgtgcaatccaagccgaaaagcgtcgtcagcacaacgctagccgtcgttcaatgactcgtacaagcatcaagaaagttatcgctgcaattgcaagcggtgacaaagaagcggcacaagctgcacttactgctgctactccagtacttgacagaatggctactaaaggcttgattcacaagaacaaagctgctcgtcataagagccgtctagctgcacaaatcaaagcactaggttaatctttacgacttaattaacggcactcctcagccaagtcaaaagcctccggtcggaggcttttgactacatgcccatggcgtttacgccccgccctgccactcatcgcagtactgttgtaattcattaagcattctgccgacatggaagccatcacaaacggcatgatgaacctgaatcgccagcggcatcagcaccttgtcgccttgcgtataatatttgcccatagtgaaaacgggggcgaagaagttgtccatattggccacgtttaaatcaaaactggtgaaactcacccagggattggctgagacgaaaaacatattctcaataaaccctttagggaaataggccaggttttcaccgtaacacgccacatcttgcgaatatatgtgtagaaactgccggaaatcgtcgtggtattcactccagagcgatgaaaacgtttcagtttgctcatggaaaacggtgtaacaagggtgaacactatcccatatcaccagctcaccgtctttcattgccatacggaactccggatgagcattcatcaggcgggcaagaatgtgaataaaggccggataaaacttgtgcttatttttctttacggtctttaaaaaggccgtaatatccagctgaacggtctggttataggtacattgagcaactgactgaaatgcctcaaaatgttctttacgatgccattgggatatatcaacggtggtatatccagtgatttttttctccattttagcttccttagctcctgaaaatctcgataactcaaaaaatacgcccggtagtgatcttatttcattatggtgaaagttggaacctcttacgtgccaggccaaataggccgt

SEQ ID NO: 285 - DNA, 4123 bp, Artificial
  Synthetic
tcagatccttccgtatttagccagtatgttctctagtgtggttcgttgtttttgcgtgagccatgagaacgaaccattgagatcatgcttactttgcatgtcactcaaaaattttgcctcaaaactggtgagctgaatttttgcagttaaagcatcgtgtagtgtttttcttagtccgttacgtaggtaggaatctgatgtaatggttgttggtattttgtcaccattcatttttatctggttgttctcaagttcggttacgagatccatttgtctatctagttcaacttggaaaatcaacgtatcagtcgggcggcctcgcttatcaaccaccaatttcatattgctgtaagtgtttaaatctttacttattggtttcaaaacccattggttaagccttttaaactcatggtagttattttcaagcattaacatgaacttaaattcatcaaggctaatctctatatttgccttgtgagttttcttttgtgttagttcttttaataaccactcataaatcctcatagagtatttgttttcaaaagacttaacatgttccagattatattttatgaatttttttaactggaaaagataaggcaatatctcttcactaaaaactaattctaatttttcgcttgagaacttggcatagtttgtccactggaaaatcttaaagcctttaaccaaaggattcctgatttccacagttctcgtcatcagctctctggttgctttagctaatacaccataagcattttccctactgatgttcatcatctgagcgtattggttataagtgaacgataccgtccgttctttccttgtagggttttcaatcgtggggttgagtagtgccacacagcataaaattagcttggtttcatgctccgttaagtcatagcgactaatcgctagttcatttgctttgaaaacaactaattcagacatacatctcaattggtctaggtgattttaatcactataccaattgagatgggctagtcaatgataattactagtccttttcctttgagttgtgggtatctgtaaattctgctagacctttgctggaaaacttgtaaattctgctagaccctctgtaaattccgctagacctttgtgtgttttttttgtttatattcaagtggttataatttatagaataaagaaagaataaaaaaagataaaaagaatagatcccagccctgtgtataactcactactttagtcagttccgcagtattacaaaaggatgtcgcaaacgctgtttgctcctctacaaaacagaccttaaaaccctaaaggcttaagtagcaccctcgcaagctcgggcaaatcgctgaatattccttttgtctccgaccatcaggcacctgagtcgctgtctttttcgtgacattcagttcgctgcgctcacggctctggcagtgaatgggggtaaatggcactacaggcgccttttatggattcatgcaaggaaactacccataatacaagaaaagcccgtcacgggcttctcagggcgttttatggcgggtctgctatgtggtgctatctgactttttgctgttcagcagttcctgccctctgattttccagtctgaccacttcggattatcccgtgacaggtcattcagactggctaatgcacccagtaaggcagcggtatcatcaacaggcttacccgtcttactgtcaagaggacatccggtcaaataaaacgaaaggctcagtcgaaagactgggcctttcgttttgctgaggagacttagggaccctttatgacaacttgacggctacatcattcactttttcttcacaaccggcacggaactcgctcgggctggccccggtgcattttttaaatacccgcgagaaatagagttgatcgtcaaaaccaacattgcgaccgacggtggcgataggcatccgggtggtgctcaaaagcagcttcgcctggctgatacgttggtcctcgcgccagcttaagacgctaatccctaactgctggcggaaaagatgtgacagacgcgacggcgacaagcaaacatgctgtgcgacgctggcgatatcaaaattgctgtctgccaggtgatcgctgatgtactgacaagcctcgcgtacccgattatccatcggtggatggagcgactcgttaatcgcttccatgcgccgcagtaacaattgctcaagcagatttatcgccagcagctccgaatagcgcccttccccttgcccggcgttaatgatttgcccaaacaggtcgctgaaatgcggctggtgcgcttcatccgggcgaaagaaccccgtattggcaaatattgacggccagttaagccattcatgccagtaggcgcgcggacgaaagtaaacccactggtgataccattcgcgagcctccggatgacgaccgtagtgatgaatctctcctggcgggaacagcaaaatatcacccggtcggcaaacaaattctcgtccctgatttttcaccaccccctgaccgcgaatggtgagattgagaatataacctttcattcccagcggtcggtcgataaaaaaatcgagataaccgttggcctcaatcggcgttaaacccgccaccagatgggcattaaacgagtatcccggcagcaggggatcattttgcgcttcagccatacttttcatactcccaccattcagagaagaaaccaattgtccatattgcatcagacattgccgtcactgcgtcttttactggctcttctcgctaacccaaccggtaaccccgcttattaaaagcattctgtaacaaagcgggaccaaagccatgacaaaaacgcgtaacaaaagtgtctataatcacggcagaaaagtccacattgattatttgcacggcgtcacactttgctatgccatagcatttttatccataagattagcggatcctacctgacgctttttatcgcaactctctactgtttctccatacccgttttacctgcaggtgcagtacaacgagtttgaggcatttatggttactattcgtttacagcgtggtggcgcgaaaaagcgtccattttatcaactagtggtggctgatagccgtcgtgcaagaaacggtcgtttcattgaaaacatcggtttcttcaacccaactgcacaaggtcaagcggagcgtcttcgcgtagatctagagcgtgttgaatactgggttggtgtaggcgcgagcttatcagatcgcgtttctagcttggtaaaagaagcgaaaaaatctgcagcgtaagctgttatacttaattaacggcactcctcagccaagtcaaaagcctccggtcggaggcttttgactacatgcccatggcgtttacgccccgccctgccactcatcgcagtactgttgtaattcattaagcattctgccgacatggaagccatcacaaacggcatgatgaacctgaatcgccagcggcatcagcaccttgtcgccttgcgtataatatttgcccatagtgaaaacgggggcgaagaagttgtccatattggccacgtttaaatcaaaactggtgaaactcacccagggattggctgagacgaaaaacatattctcaataaaccctttagggaaataggccaggttttcaccgtaacacgccacatcttgcgaatatatgtgtagaaactgccggaaatcgtcgtggtattcactccagagcgatgaaaacgtttcagtttgctcatggaaaacggtgtaacaagggtgaacactatcccatatcaccagctcaccgtctttcattgccatacggaactccggatgagcattcatcaggcgggcaagaatgtgaataaaggccggataaaacttgtgcttatttttctttacggtctttaaaaaggccgtaatatccagctgaacggtctggttataggtacattgagcaactgactgaaatgcctcaaaatgttctttacgatgccattgggatatatcaacggtggtatatccagtgatttttttctccattttagcttccttagctcctgaaaatctcgataactcaaaaaatacgcccggtagtgatcttatttcattatggtgaaagttggaacctcttacgtgccaggccaaataggccgt

SEQ ID NO: 286 - DNA, 4135 bp, Artificial
  Synthetic
tcagatccttccgtatttagccagtatgttctctagtgtggttcgttgtttttgcgtgagccatgagaacgaaccattgagatcatgcttactttgcatgtcactcaaaaattttgcctcaaaactggtgagctgaatttttgcagttaaagcatcgtgtagtgtttttcttagtccgttacgtaggtaggaatctgatgtaatggttgttggtattttgtcaccattcatttttatctggttgttctcaagttcggttacgagatccatttgtctatctagttcaacttggaaaatcaacgtatcagtcgggcggcctcgcttatcaaccaccaatttcatattgctgtaagtgtttaaatctttacttattggtttcaaaacccattggttaagccttttaaactcatggtagttattttcaagcattaacatgaacttaaattcatcaaggctaatctctatatttgccttgtgagttttcttttgtgttagttcttttaataaccactcataaatcctcatagagtatttgttttcaaaagacttaacatgttccagattatattttatgaatttttttaactggaaaagataaggcaatatctcttcactaaaaactaattctaatttttcgcttgagaacttggcatagtttgtccactggaaaatcttaaagcctttaaccaaaggattcctgatttccacagttctcgtcatcagctctctggttgctttagctaatacaccataagcattttccctactgatgttcatcatctgagcgtattggttataagtgaacgataccgtccgttctttccttgtagggttttcaatcgtggggttgagtagtgccacacagcataaaattagcttggtttcatgctccgttaagtcatagcgactaatcgctagttcatttgctttgaaaacaactaattcagacatacatctcaattggtctaggtgattttaatcactataccaattgagatgggctagtcaatgataattactagtccttttcctttgagttgtgggtatctgtaaattctgctagacctttgctggaaaacttgtaaattctgctagaccctctgtaaattccgctagacctttgtgtgttttttttgtttatattcaagtggttataatttatagaataaagaaagaataaaaaaagataaaaagaatagatcccagccctgtgtataactcactactttagtcagttccgcagtattacaaaaggatgtcgcaaacgctgtttgctcctctacaaaacagaccttaaaaccctaaaggcttaagtagcaccctcgcaagctcgggcaaatcgctgaatattccttttgtctccgaccatcaggcacctgagtcgctgtctttttcgtgacattcagttcgctgcgctcacggctctggcagtgaatgggggtaaatggcactacaggcgccttttatggattcatgcaaggaaactacccataatacaagaaaagcccgtcacgggcttctcagggcgttttatggcgggtctgctatgtggtgctatctgactttttgctgttcagcagttcctgccctctgattttccagtctgaccacttcggattatcccgtgacaggtcattcagactggctaatgcacccagtaaggcagcggtatcatcaacaggcttacccgtcttactgtcaagaggacatccggtcaaataaaacgaaaggctcagtcgaaagactgggcctttcgttttgctgaggagacttagggaccctttatgacaacttgacggctacatcattcactttttcttcacaaccggcacggaactcgctcgggctggccccggtgcattttttaaatacccgcgagaaatagagttgatcgtcaaaaccaacattgcgaccgacggtggcgataggcatccgggtggtgctcaaaagcagcttcgcctggctgatacgttggtcctcgcgccagcttaagacgctaatccctaactgctggcggaaaagatgtgacagacgcgacggcgacaagcaaacatgctgtgcgacgctggcgatatcaaaattgctgtctgccaggtgatcgctgatgtactgacaagcctcgcgtacccgattatccatcggtggatggagcgactcgttaatcgcttccatgcgccgcagtaacaattgctcaagcagatttatcgccagcagctccgaatagcgcccttccccttgcccggcgttaatgatttgcccaaacaggtcgctgaaatgcggctggtgcgcttcatccgggcgaaagaaccccgtattggcaaatattgacggccagttaagccattcatgccagtaggcgcgcggacgaaagtaaacccactggtgataccattcgcgagcctccggatgacgaccgtagtgatgaatctctcctggcgggaacagcaaaatatcacccggtcggcaaacaaattctcgtccctgatttttcaccaccccctgaccgcgaatggtgagattgagaatataacctttcattcccagcggtcggtcgataaaaaaatcgagataaccgttggcctcaatcggcgttaaacccgccaccagatgggcattaaacgagtatcccggcagcaggggatcattttgcgcttcagccatacttttcatactcccaccattcagagaagaaaccaattgtccatattgcatcagacattgccgtcactgcgtcttttactggctcttctcgctaacccaaccggtaaccccgcttattaaaagcattctgtaacaaagcgggaccaaagccatgacaaaaacgcgtaacaaaagtgtctataatcacggcagaaaagtccacattgattatttgcacggcgtcacactttgctatgccatagcatttttatccataagattagcggatcctacctgacgctttttatcgcaactctctactgtttctccatacccgttttacctgcaggtgcagtttctttcaggagattccaatatggcaaacagcgcacaagcacgcaaacgtgcccgccagtccgtcaaacaacgcgcccacaacgctagcctgcgtaccgcattccgcaccgcagtgaaaaaagtattgaaagcagtcgaagcaggcgataaagctgccgcacgagcggtttaccaagagtccgtcaaagtcatcgaccgcatcgccgacaaaggcgtgttccacaaaaacaaagcggctcgccacaaaagccgcctgtctgcaaaagtaaaagcactggcttgatttttgcaacttaattaacggcactcctcagccaagtcaaaagcctccggtcggaggcttttgactacatgcccatggcgtttacgccccgccctgccactcatcgcagtactgttgtaattcattaagcattctgccgacatggaagccatcacaaacggcatgatgaacctgaatcgccagcggcatcagcaccttgtcgccttgcgtataatatttgcccatagtgaaaacgggggcgaagaagttgtccatattggccacgtttaaatcaaaactggtgaaactcacccagggattggctgagacgaaaaacatattctcaataaaccctttagggaaataggccaggttttcaccgtaacacgccacatcttgcgaatatatgtgtagaaactgccggaaatcgtcgtggtattcactccagagcgatgaaaacgtttcagtttgctcatggaaaacggtgtaacaagggtgaacactatcccatatcaccagctcaccgtctttcattgccatacggaactccggatgagcattcatcaggcgggcaagaatgtgaataaaggccggataaaacttgtgcttatttttctttacggtctttaaaaaggccgtaatatccagctgaacggtctggttataggtacattgagcaactgactgaaatgcctcaaaatgttctttacgatgccattgggatatatcaacggtggtatatccagtgatttttttctccattttagcttccttagctcctgaaaatctcgataactcaaaaaatacgcccggtagtgatcttatttcattatggtgaaagttggaacctcttacgtgccaagccaaataggccgt

SEQ ID NO: 287 - DNA, 4117 bp, Artificial
  Synthetic
tcagatccttccgtatttagccagtatgttctctagtgtggttcgttgtttttgcgtgagccatgagaacgaaccattgagatcatgcttactttgcatgtcactcaaaaattttgcctcaaaactggtgagctgaatttttgcagttaaagcatcgtgtagtgtttttcttagtccgttacgtaggtaggaatctgatgtaatggttgttggtattttgtcaccattcatttttatctggttgttctcaagttcggttacgagatccatttgtctatctagttcaacttggaaaatcaacgtatcagtcgggcggcctcgcttatcaaccaccaatttcatattgctgtaagtgtttaaatctttacttattggtttcaaaacccattggttaagccttttaaactcatggtagttattttcaagcattaacatgaacttaaattcatcaaggctaatctctatatttgccttgtgagttttcttttgtgttagttcttttaataaccactcataaatcctcatagagtatttgttttcaaaagacttaacatgttccagattatattttatgaatttttttaactggaaaagataaggcaatatctcttcactaaaaactaattctaatttttcgcttgagaacttggcatagtttgtccactggaaaatcttaaagcctttaaccaaaggattcctgatttccacagttctcgtcatcagctctctggttgctttagctaatacaccataagcattttccctactgatgttcatcatctgagcgtattggttataagtgaacgataccgtccgttctttccttgtagggttttcaatcgtggggttgagtagtgccacacagcataaaattagcttggtttcatgctccgttaagtcatagcgactaatcgctagttcatttgctttgaaaacaactaattcagacatacatctcaattggtctaggtgattttaatcactataccaattgagatgggctagtcaatgataattactagtccttttcctttgagttgtgggtatctgtaaattctgctagacctttgctggaaaacttgtaaattctgctagaccctctgtaaattccgctagacctttgtgtgttttttttgtttatattcaagtggttataatttatagaataaagaaagaataaaaaaagataaaaagaatagatcccagccctgtgtataactcactactttagtcagttccgcagtattacaaaaggatgtcgcaaacgctgtttgctcctctacaaaacagaccttaaaaccctaaaggcttaagtagcaccctcgcaagctcgggcaaatcgctgaatattccttttgtctccgaccatcaggcacctgagtcgctgtctttttcgtgacattcagttcgctgcgctcacggctctggcagtgaatgggggtaaatggcactacaggcgccttttatggattcatgcaaggaaactacccataatacaagaaaagcccgtcacgggcttctcagggcgttttatggcgggtctgctatgtggtgctatctgactttttgctgttcagcagttcctgccctctgattttccagtctgaccacttcggattatcccgtgacaggtcattcagactggctaatgcacccagtaaggcagcggtatcatcaacaggcttacccgtcttactgtcaagaggacatccggtcaaataaaacgaaaggctcagtcgaaagactgggcctttcgttttgctgaggagacttagggaccctttatgacaacttgacggctacatcattcactttttcttcacaaccggcacggaactcgctcgggctggccccggtgcattttttaaatacccgcgagaaatagagttgatcgtcaaaaccaacattgcgaccgacggtggcgataggcatccgggtggtgctcaaaagcagcttcgcctggctgatacgttggtcctcgcgccagcttaagacgctaatccctaactgctggcggaaaagatgtgacagacgcgacggcgacaagcaaacatgctgtgcgacgctggcgatatcaaaattgctgtctgccaggtgatcgctgatgtactgacaagcctcgcgtacccgattatccatcggtggatggagcgactcgttaatcgcttccatgcgccgcagtaacaattgctcaagcagatttatcgccagcagctccgaatagcgcccttccccttgcccggcgttaatgatttgcccaaacaggtcgctgaaatgcggctggtgcgcttcatccgggcgaaagaaccccgtattggcaaatattgacggccagttaagccattcatgccagtaggcgcgcggacgaaagtaaacccactggtgataccattcgcgagcctccggatgacgaccgtagtgatgaatctctcctggcgggaacagcaaaatatcacccggtcggcaaacaaattctcgtccctgatttttcaccaccccctgaccgcgaatggtgagattgagaatataacctttcattcccagcggtcggtcgataaaaaaatcgagataaccgttggcctcaatcggcgttaaacccgccaccagatgggcattaaacgagtatcccggcagcaggggatcattttgcgcttcagccatacttttcatactcccaccattcagagaagaaaccaattgtccatattgcatcagacattgccgtcactgcgtcttttactggctcttctcgctaacccaaccggtaaccccgcttattaaaagcattctgtaacaaagcgggaccaaagccatgacaaaaacgcgtaacaaaagtgtctataatcacggcagaaaagtccacattgattatttgcacggcgtcacactttgctatgccatagcatttttatccataagattagcggatcctacctgacgctttttatcgcaactctctactgtttctccatacccgttttacctgcaggtgcagtttttctcaaaaggactcaaaatggtagttatccgtttggcacgcggcggctcgaaacaccgccccttctacaacgtcatcgttactgactcacgcagccgccgcgacggccgcttcatcgaacgcgtaggcttctacaaccccgtagccaacgaaaaacaagagcgcgtccgcctcaatgcagaccgcctgaaccactggattgcacaaggcgcgcaagtcagcgactccgttgcaaaactgattaaagaacaaaaagccgtctaatccgcgttacttaattaacggcactcctcagccaagtcaaaagcctccggtcggaggcttttgactacatgcccatggcgtttacgccccgccctgccactcatcgcagtactgttgtaattcattaagcattctgccgacatggaagccatcacaaacggcatgatgaacctgaatcgccagcggcatcagcaccttgtcgccttgcgtataatatttgcccatagtgaaaacgggggcgaagaagttgtccatattggccacgtttaaatcaaaactggtgaaactcacccagggattggctgagacgaaaaacatattctcaataaaccctttagggaaataggccaggttttcaccgtaacacgccacatcttgcgaatatatgtgtagaaactgccggaaatcgtcgtggtattcactccagagcgatgaaaacgtttcagtttgctcatggaaaacggtgtaacaagggtgaacactatcccatatcaccagctcaccgtctttcattgccatacggaactccggatgagcattcatcaggcgggcaagaatgtgaataaaggccggataaaacttgtgcttatttttctttacggtctttaaaaaggccgtaatatccagctgaacggtctggttataggtacattgagcaactgactgaaatgcctcaaaatgttctttacgatgccattgggatatatcaacggtggtatatccagtgatttttttctccattttagcttccttagctcctgaaaatctcgataactcaaaaaatacgcccggtagtgatcttatttcattatggtgaaagttggaacctcttacgtgccaagccaaataggccgt

SEQ ID NO: 288 - DNA, 4159 bp, Artificial
  Synthetic
tcagatccttccgtatttagccagtatgttctctagtgtggttcgttgtttttgcgtgagccatgagaacgaaccattgagatcatgcttactttgcatgtcactcaaaaattttgcctcaaaactggtgagctgaatttttgcagttaaagcatcgtgtagtgtttttcttagtccgttacgtaggtaggaatctgatgtaatggttgttggtattttgtcaccattcatttttatctggttgttctcaagttcggttacgagatccatttgtctatctagttcaacttggaaaatcaacgtatcagtcgggcggcctcgcttatcaaccaccaatttcatattgctgtaagtgtttaaatctttacttattggtttcaaaacccattggttaagccttttaaactcatggtagttattttcaagcattaacatgaacttaaattcatcaaggctaatctctatatttgccttgtgagttttcttttgtgttagttcttttaataaccactcataaatcctcatagagtatttgttttcaaaagacttaacatgttccagattatattttatgaatttttttaactggaaaagataaggcaatatctcttcactaaaaactaattctaatttttcgcttgagaacttggcatagtttgtccactggaaaatcttaaagcctttaaccaaaggattcctgatttccacagttctcgtcatcagctctctggttgctttagctaatacaccataagcattttccctactgatgttcatcatctgagcgtattggttataagtgaacgataccgtccgttctttccttgtagggttttcaatcgtggggttgagtagtgccacacagcataaaattagcttggtttcatgctccgttaagtcatagcgactaatcgctagttcatttgctttgaaaacaactaattcagacatacatctcaattggtctaggtgattttaatcactataccaattgagatgggctagtcaatgataattactagtccttttcctttgagttgtgggtatctgtaaattctgctagacctttgctggaaaacttgtaaattctgctagaccctctgtaaattccgctagacctttgtgtgttttttttgtttatattcaagtggttataatttatagaataaagaaagaataaaaaaagataaaaagaatagatcccagccctgtgtataactcactactttagtcagttccgcagtattacaaaaggatgtcgcaaacgctgtttgctcctctacaaaacagaccttaaaaccctaaaggcttaagtagcaccctcgcaagctcgggcaaatcgctgaatattccttttgtctccgaccatcaggcacctgagtcgctgtctttttcgtgacattcagttcgctgcgctcacggctctggcagtgaatgggggtaaatggcactacaggcgccttttatggattcatgcaaggaaactacccataatacaagaaaagcccgtcacgggcttctcagggcgttttatggcgggtctgctatgtggtgctatctgactttttgctgttcagcagttcctgccctctgattttccagtctgaccacttcggattatcccgtgacaggtcattcagactggctaatgcacccagtaaggcagcggtatcatcaacaggcttacccgtcttactgtcaagaggacatccggtcaaataaaacgaaaggctcagtcgaaagactgggcctttcgttttgctgaggagacttagggaccctttatgacaacttgacggctacatcattcactttttcttcacaaccggcacggaactcgctcgggctggccccggtgcattttttaaatacccgcgagaaatagagttgatcgtcaaaaccaacattgcgaccgacggtggcgataggcatccgggtggtgctcaaaagcagcttcgcctggctgatacgttggtcctcgcgccagcttaagacgctaatccctaactgctggcggaaaagatgtgacagacgcgacggcgacaagcaaacatgctgtgcgacgctggcgatatcaaaattgctgtctgccaggtgatcgctgatgtactgacaagcctcgcgtacccgattatccatcggtggatggagcgactcgttaatcgcttccatgcgccgcagtaacaattgctcaagcagatttatcgccagcagctccgaatagcgcccttccccttgcccggcgttaatgatttgcccaaacaggtcgctgaaatgcggctggtgcgcttcatccgggcgaaagaaccccgtattggcaaatattgacggccagttaagccattcatgccagtaggcgcgcggacgaaagtaaacccactggtgataccattcgcgagcctccggatgacgaccgtagtgatgaatctctcctggcgggaacagcaaaatatcacccggtcggcaaacaaattctcgtccctgatttttcaccaccccctgaccgcgaatggtgagattgagaatataacctttcattcccagcggtcggtcgataaaaaaatcgagataaccgttggcctcaatcggcgttaaacccgccaccagatgggcattaaacgagtatcccggcagcaggggatcattttgcgcttcagccatacttttcatactcccaccattcagagaagaaaccaattgtccatattgcatcagacattgccgtcactgcgtcttttactggctcttctcgctaacccaaccggtaaccccgcttattaaaagcattctgtaacaaagcgggaccaaagccatgacaaaaacgcgtaacaaaagtgtctataatcacggcagaaaagtccacattgattatttgcacggcgtcacactttgctatgccatagcatttttatccataagattagcggatcctacctgacgctttttatcgcaactctctactgtttctccatacccgttttacctgcaggtgcagtctcataaacaggcgcagccattgggctgcaaggagatagacaacgtggcaaatcatgtatccgcactgaaacgtgcccgccaggatcaaaagaaacgtattcagaatcgtgcccagaagtcggctatgcgtactgccgtcaagcaggtgctggtggctgtagaggcaggagacaagcaggctgcatccgatgcgctgaagcaggcgacgtccttgcttgaccgtgccggccgcaagaaccagatgcatccgcgtcaggcttcccgccgtgtttcccgcctgaatgcccatgttaaggctattggctaatatacctaacttaattaacggcactcctcagccaagtcaaaagcctccggtcggaggcttttgactacatgcccatggcgtttacgctccgccctgccactcatcgcagtactgttgtaattcattaagcattctgccgacatggaagccatcacaaacggcatgatgaacctgaatcgccagcggcatcagcaccttgtcgccttgcgtataatatttgcccatagtgaaaacgggggcgaagaagttgtccatattggccacgtttaaatcaaaactggtgaaactcacccagggattggctgagacgaaaaacatattctcaataaaccctttagggaaataggccaggttttcaccgtaacacgccacatcttgcgaatatatgtgtagaaactgccggaaatcgtcgtggtattcactccagagcgatgaaaacgtttcagtttgctcatggaaaacggtgtaacaagggtgaacactatcccatatcaccagctcaccgtctttcattgccatacggaactccggatgagcattcatcaggcgggcaagaatgtgaataaaggccggataaaacttgtgcttatttttctttacggtctttaaaaaggccgtaatatccagctgaacggtctggttataggtacattgagcaactgactgaaatgcctcaaaatgttctttacgatgccattgggatatatcaacggtggtatatccagtgatttttttctccattttagcttccttagctcctgaaaatctcgataactcaaaaaatacgcccggtagtgatcttatttcattatggtgaaagttggaacctcttacgtgccaagccaaataggccgt

SEQ ID NO: 289 - DNA, 4111 bp, Artificial
  Synthetic
tcagatccttccgtatttagccagtatgttctctagtgtggttcgttgtttttgcgtgagccatgagaacgaaccattgagatcatgcttactttgcatgtcactcaaaaattttgcctcaaaactggtgagctgaatttttgcagttaaagcatcgtgtagtgtttttcttagtccgttacgtaggtaggaatctgatgtaatggttgttggtattttgtcaccattcatttttatctggttgttctcaagttcggttacgagatccatttgtctatctagttcaacttggaaaatcaacgtatcagtcgggcggcctcgcttatcaaccaccaatttcatattgctgtaagtgtttaaatctttacttattggtttcaaaacccattggttaagccttttaaactcatggtagttattttcaagcattaacatgaacttaaattcatcaaggctaatctctatatttgccttgtgagttttcttttgtgttagttcttttaataaccactcataaatcctcatagagtatttgttttcaaaagacttaacatgttccagattatattttatgaatttttttaactggaaaagataaggcaatatctcttcactaaaaactaattctaatttttcgcttgagaacttggcatagtttgtccactggaaaatcttaaagcctttaaccaaaggattcctgatttccacagttctcgtcatcagctctctggttgctttagctaatacaccataagcattttccctactgatgttcatcatctgagcgtattggttataagtgaacgataccgtccgttctttccttgtagggttttcaatcgtggggttgagtagtgccacacagcataaaattagcttggtttcatgctccgttaagtcatagcgactaatcgctagttcatttgctttgaaaacaactaattcagacatacatctcaattggtctaggtgattttaatcactataccaattgagatgggctagtcaatgataattactagtccttttcctttgagttgtgggtatctgtaaattctgctagacctttgctggaaaacttgtaaattctgctagaccctctgtaaattccgctagacctttgtgtgttttttttgtttatattcaagtggttataatttatagaataaagaaagaataaaaaaagataaaaagaatagatcccagccctgtgtataactcactactttagtcagttccgcagtattacaaaaggatgtcgcaaacgctgtttgctcctctacaaaacagaccttaaaaccctaaaggcttaagtagcaccctcgcaagctcgggcaaatcgctgaatattccttttgtctccgaccatcaggcacctgagtcgctgtctttttcgtgacattcagttcgctgcgctcacggctctggcagtgaatgggggtaaatggcactacaggcgccttttatggattcatgcaaggaaactacccataatacaagaaaagcccgtcacgggcttctcagggcgttttatggcgggtctgctatgtggtgctatctgactttttgctgttcagcagttcctgccctctgattttccagtctgaccacttcggattatcccgtgacaggtcattcagactggctaatgcacccagtaaggcagcggtatcatcaacaggcttacccgtcttactgtcaagaggacatccggtcaaataaaacgaaaggctcagtcgaaagactgggcctttcgttttgctgaggagacttagggaccctttatgacaacttgacggctacatcattcactttttcttcacaaccggcacggaactcgctcgggctggccccggtgcattttttaaatacccgcgagaaatagagttgatcgtcaaaaccaacattgcgaccgacggtggcgataggcatccgggtggtgctcaaaagcagcttcgcctggctgatacgttggtcctcgcgccagcttaagacgctaatccctaactgctggcggaaaagatgtgacagacgcgacggcgacaagcaaacatgctgtgcgacgctggcgatatcaaaattgctgtctgccaggtgatcgctgatgtactgacaagcctcgcgtacccgattatccatcggtggatggagcgactcgttaatcgcttccatgcgccgcagtaacaattgctcaagcagatttatcgccagcagctccgaatagcgcccttccccttgcccggcgttaatgatttgcccaaacaggtcgctgaaatgcggctggtgcgcttcatccgggcgaaagaaccccgtattggcaaatattgacggccagttaagccattcatgccagtaggcgcgcggacgaaagtaaacccactggtgataccattcgcgagcctccggatgacgaccgtagtgatgaatctctcctggcgggaacagcaaaatatcacccggtcggcaaacaaattctcgtccctgatttttcaccaccccctgaccgcgaatggtgagattgagaatataacctttcattcccagcggtcggtcgataaaaaaatcgagataaccgttggcctcaatcggcgttaaacccgccaccagatgggcattaaacgagtatcccggcagcaggggatcattttgcgcttcagccatacttttcatactcccaccattcagagaagaaaccaattgtccatattgcatcagacattgccgtcactgcgtcttttactggctcttctcgctaacccaaccggtaaccccgcttattaaaagcattctgtaacaaagcgggaccaaagccatgacaaaaacgcgtaacaaaagtgtctataatcacggcagaaaagtccacattgattatttgcacggcgtcacactttgctatgccatagcatttttatccataagattagcggatcctacctgacgctttttatcgcaactctctactgtttctccatacccgttttacctgcaggtgcagtatttttcggaggtaacaaatatggcaactgtgattcgcctgagccgtggtggacgcaagaagcgtcctttttattctgtagtcgtcatggacggccgcaagcgtcgtgatggcgcatttatcgagaagctcggttattttgatccgtgcaaagatcctgaagtgatccagctggaccttgagcgtgtgaaagcatggaccgatcagggtgcccaggtatccgatcgcgtggctagcctgatcgccaaggcatccgcgtaatcagcttgacttaattaacggcactcctcagccaagtcaaaagcctccggtcggaggcttttgactacatgcccatggcgtttacgctccgccctgccactcatcgcagtactgttgtaattcattaagcattctgccgacatggaagccatcacaaacggcatgatgaacctgaatcgccagcggcatcagcaccttgtcgccttgcgtataatatttgcccatagtgaaaacgggggcgaagaagttgtccatattggccacgtttaaatcaaaactggtgaaactcacccagggattggctgagacgaaaaacatattctcaataaaccctttagggaaataggccaggttttcaccgtaacacgccacatcttgcgaatatatgtgtagaaactgccggaaatcgtcgtggtattcactccagagcgatgaaaacgtttcagtttgctcatggaaaacggtgtaacaagggtgaacactatcccatatcaccagctcaccgtctttcattgccatacggaactccggatgagcattcatcaggcgggcaagaatgtgaataaaggccggataaaacttgtgcttatttttctttacggtctttaaaaaggccgtaatatccagctgaacggtctggttataggtacattgagcaactgactgaaatgcctcaaaatgttctttacgatgccattgggatatatcaacggtggtatatccagtgatttttttctccattttagcttccttagctcctgaaaatctcgataactcaaaaaatacgcccggtagtgatcttatttcattatggtgaaagttggaacctcttacgtgccaagccaaataggccgt

SEQ ID NO: 290 - DNA, 6391 bp, Artificial
  Synthetic
tcagatccttccgtatttagccagtatgttctctagtgtggttcgttgtttttgcgtgagccatgagaacgaaccattgagatcatgcttactttgcatgtcactcaaaaattttgcctcaaaactggtgagctgaatttttgcagttaaagcatcgtgtagtgtttttcttagtccgttacgtaggtaggaatctgatgtaatggttgttggtattttgtcaccattcatttttatctggttgttctcaagttcggttacgagatccatttgtctatctagttcaacttggaaaatcaacgtatcagtcgggcggcctcgcttatcaaccaccaatttcatattgctgtaagtgtttaaatctttacttattggtttcaaaacccattggttaagccttttaaactcatggtagttattttcaagcattaacatgaacttaaattcatcaaggctaatctctatatttgccttgtgagttttcttttgtgttagttcttttaataaccactcataaatcctcatagagtatttgttttcaaaagacttaacatgttccagattatattttatgaatttttttaactggaaaagataaggcaatatctcttcactaaaaactaattctaatttttcgcttgagaacttggcatagtttgtccactggaaaatcttaaagcctttaaccaaaggattcctgatttccacagttctcgtcatcagctctctggttgctttagctaatacaccataagcattttccctactgatgttcatcatctgagcgtattggttataagtgaacgataccgtccgttctttccttgtagggttttcaatcgtggggttgagtagtgccacacagcataaaattagcttggtttcatgctccgttaagtcatagcgactaatcgctagttcatttgctttgaaaacaactaattcagacatacatctcaattggtctaggtgattttaatcactataccaattgagatgggctagtcaatgataattactagtccttttcctttgagttgtgggtatctgtaaattctgctagacctttgctggaaaacttgtaaattctgctagaccctctgtaaattccgctagacctttgtgtgttttttttgtttatattcaagtggttataatttatagaataaagaaagaataaaaaaagataaaaagaatagatcccagccctgtgtataactcactactttagtcagttccgcagtattacaaaaggatgtcgcaaacgctgtttgctcctctacaaaacagaccttaaaaccctaaaggcttaagtagcaccctcgcaagctcgggcaaatcgctgaatattccttttgtctccgaccatcaggcacctgagtcgctgtctttttcgtgacattcagttcgctgcgctcacggctctggcagtgaatgggggtaaatggcactacaggcgccttttatggattcatgcaaggaaactacccataatacaagaaaagcccgtcacgggcttctcagggcgttttatggcgggtctgctatgtggtgctatctgactttttgctgttcagcagttcctgccctctgattttccagtctgaccacttcggattatcccgtgacaggtcattcagactggctaatgcacccagtaaggcagcggtatcatcaacaggcttacccgtcttactgtcaagaggacatccggtcaaataaaacgaaaggctcagtcgaaagactgggcctttcgttttgctgaggagacttagggaccctttatgacaacttgacggctacatcattcactttttcttcacaaccggcacggaactcgctcgggctggccccggtgcattttttaaatacccgcgagaaatagagttgatcgtcaaaaccaacattgcgaccgacggtggcgataggcatccgggtggtgctcaaaagcagcttcgcctggctgatacgttggtcctcgcgccagcttaagacgctaatccctaactgctggcggaaaagatgtgacagacgcgacggcgacaagcaaacatgctgtgcgacgctggcgatatcaaaattgctgtctgccaggtgatcgctgatgtactgacaagcctcgcgtacccgattatccatcggtggatggagcgactcgttaatcgcttccatgcgccgcagtaacaattgctcaagcagatttatcgccagcagctccgaatagcgcccttccccttgcccggcgttaatgatttgcccaaacaggtcgctgaaatgcggctggtgcgcttcatccgggcgaaagaaccccgtattggcaaatattgacggccagttaagccattcatgccagtaggcgcgcggacgaaagtaaacccactggtgataccattcgcgagcctccggatgacgaccgtagtgatgaatctctcctggcgggaacagcaaaatatcacccggtcggcaaacaaattctcgtccctgatttttcaccaccccctgaccgcgaatggtgagattgagaatataacctttcattcccagcggtcggtcgataaaaaaatcgagataaccgttggcctcaatcggcgttaaacccgccaccagatgggcattaaacgagtatcccggcagcaggggatcattttgcgcttcagccatacttttcatactcccaccattcagagaagaaaccaattgtccatattgcatcagacattgccgtcactgcgtcttttactggctcttctcgctaacccaaccggtaaccccgcttattaaaagcattctgtaacaaagcgggaccaaagccatgacaaaaacgcgtaacaaaagtgtctataatcacggcagaaaagtccacattgattatttgcacggcgtcacactttgctatgccatagcatttttatccataagattagcggatcctacctgacgctttttatcgcaactctctactgtttctccatacccgttttacctgcaggtgcagtaagaatgcggagttttagcaatgcctaaaatgaaaactgtaagcggtgccgccaaacgttttaagaaaacgggttctggccgctttaaaagcaaacagtctcacttacgtcacattctgactaagaagagctctaagcgtaaacgtcaccttcgtggcaaaaaactggttcatgactctgataccaaattggttcagcgcatgttgccttacgtataagacttaggagactgattaatggctagagtaaaacgcggcactatcgcacgtgctcgtcacaaaaaagtcctcaagcaggcaaaaggttattacggcgcacgttcacgtgtatatcgcgtagcggtacaagctgtaactaaagctggtcaatatgcttaccgtgaccgtcgtcagcgcaagcgtcaattccgtcaactatggattgcacgtattaacgctgctgctcgtcaaaatggtatgtcatacagccgtttcatcaacggtttgaagaaagcgtctgttgaaatcgatcgtaagatccttgccgacatcgcagtacatgacaaagcagctttcagcgcactagtcgaagcggctaaaggcgcattagcttaattattaacgaggcagagcggagttaactatgtacgcggttttccaaagtggcggtaaacaacaccgtgtggccgaaggccaaaccgttcgtcttgaaaaaatcgaagtagccccaggcgaaacggttgaatttgacaaagttttaatggtaagcaacggtgacgacgtaaaaatcggcacaccaatcgttgctggtggtaaggtgactgctgaggttgttacacacggtcgtggcgataaagtaaaaatcgttaagttccgtcgtcgtaagcactctcgtaagcaagcgggtcaccgtcagtggttcacagaagtgaaaatcactggtatcaacgcataataggagcacgaacacatggcacacaaaaaagctggtggtagtaccaaaaacggtcgtgattcagaaagtaaacgcctaggtgttaagcgctttggtggtgaatctgttcttgctggtaacatcattgttcgtcaacgtggtactcgtttccacgctggtgacaacatgggtatcggtaaagaccacacgttgtttgcactaaaagacggtaaagttcagttcgacgttaaaggaccgaagaaccgtaaatttgtaagcatcgtagctgagtaagcgcgtaatatatttttggagacagacaatgtctgaagcaaatttcaaactagacgcttctgttcgtacagacctagggaaaggtgcgagccgccgcctacgtcgcgaagataagcttcctggtatcatctacggtggtgaagaagcaccagtttctatcacactagatcataacaaagtaaacaactctgctgactttgaagcgttttattctcacgttcttgagattaaccttgacggtaaagtcgttgaagttctagttaaagatatgcaacgtcacccgttcaagccaaagatcacacacattgacttccaacgtgtaatcgctggtcaagacgttcacactaacgtaccacttcacttcgtaaatgaagagaaatctgctgctgttaaagctggcggtattgctgagcaccacgtaactgaaatcgaagttacttgtctacctaagaaccttcctgagttcatcgaagtagacatggctggtgttgaaatgggtcaaacgctacacctttctgacctaactcttccagctggcgtttcttcagttgaacttgcgaagaacgacgaagctcacgacctagcggttgtaactgttaagcctgctcctaaagcggctgacgcagaagaagacggcgaagaagcagcttctgaggaataatcctgttgttgttctggagacaaatacaatgtcaagagtatgccaagtaacaggtaagcgtccaacggttggtaataaccgttcacacgcaagaaatgcgactcgtcgtcgctttttgccaaaccttcaaacacaccgtttttgggttgagagcgaaaaccgttttgtaaaactacgtttgtctgcaaaaggcatgcgtatcatcgacaagaaaggtattgattcagtactaactgacatccgtacccgtggtgagaaaatctaaggaagccgacaatgcgtgataaaattaaactagtttcttcagcaggtacaggtttcttctacactactgataaaaacaagcgtaacatgcctggcaaaatggagatcaaaaagtatgatcccgttgtgcgtaagcacgttatgttcaaagaggccaaaatcaagtaattagcttgttattatgtgaggtaacccaatgaaacaagatatccacccaaaatacgaagaaatcacagcaacttgctcatgtggtaacgtaatgaacattcgttctacgcttggtaaagacatcaacctagacgtatgttcttcatgtcacccattctacactggtaagcaacgtaacgttgacactggtggtcgtgttgatcgcttcaagaagcgtttcggtgcattgggcaaaaagtaagcctgataacttaattaacggcactcctcagccaagtcaaaagcctccggtcggaggcttttgactacatgcccatggcgtttacgccccgccctgccactcatcgcagtactgttgtaattcattaagcattctgccgacatggaagccatcacaaacggcatgatgaacctgaatcgccagcggcatcagcaccttgtcgccttgcgtataatatttgcccatagtgaaaacgggggcgaagaagttgtccatattggccacgtttaaatcaaaactggtgaaactcacccagggattggctgagacgaaaaacatattctcaataaaccctttagggaaataggccaggttttcaccgtaacacgccacatcttgcgaatatatgtgtagaaactgccggaaatcgtcgtggtattcactccagagcgatgaaaacgtttcagtttgctcatggaaaacggtgtaacaagggtgaacactatcccatatcaccagctcaccgtctttcattgccatacggaactccggatgagcattcatcaggcgggcaagaatgtgaataaaggccggataaaacttgtgcttatttttctttacggtctttaaaaaggccgtaatatccagctgaacggtctggttataggtacattgagcaactgactgaaatgcctcaaaatgttctttacgatgccattgggatatatcaacggtggtatatccagtgatttttttctccattttagcttccttagctcctgaaaatctcgataactcaaaaaatacgcccggtagtgatcttatttcattatggtgaaagttggaacctcttacgtgccaagccaaataggccgt

SEQ ID NO: 291 - DNA, 6150 bp, Artificial
  Synthetic
tcagatccttccgtatttagccagtatgttctctagtgtggttcgttgtttttgcgtgagccatgagaacgaaccattgagatcatgcttactttgcatgtcactcaaaaattttgcctcaaaactggtgagctgaatttttgcagttaaagcatcgtgtagtgtttttcttagtccgttacgtaggtaggaatctgatgtaatggttgttggtattttgtcaccattcatttttatctggttgttctcaagttcggttacgagatccatttgtctatctagttcaacttggaaaatcaacgtatcagtcgggcggcctcgcttatcaaccaccaatttcatattgctgtaagtgtttaaatctttacttattggtttcaaaacccattggttaagccttttaaactcatggtagttattttcaagcattaacatgaacttaaattcatcaaggctaatctctatatttgccttgtgagttttcttttgtgttagttcttttaataaccactcataaatcctcatagagtatttgttttcaaaagacttaacatgttccagattatattttatgaatttttttaactggaaaagataaggcaatatctcttcactaaaaactaattctaatttttcgcttgagaacttggcatagtttgtccactggaaaatcttaaagcctttaaccaaaggattcctgatttccacagttctcgtcatcagctctctggttgctttagctaatacaccataagcattttccctactgatgttcatcatctgagcgtattggttataagtgaacgataccgtccgttctttccttgtagggttttcaatcgtggggttgagtagtgccacacagcataaaattagcttggtttcatgctccgttaagtcatagcgactaatcgctagttcatttgctttgaaaacaactaattcagacatacatctcaattggtctaggtgattttaatcactataccaattgagatgggctagtcaatgataattactagtccttttcctttgagttgtgggtatctgtaaattctgctagacctttgctggaaaacttgtaaattctgctagaccctctgtaaattccgctagacctttgtgtgttttttttgtttatattcaagtggttataatttatagaataaagaaagaataaaaaaagataaaaagaatagatcccagccctgtgtataactcactactttagtcagttccgcagtattacaaaaggatgtcgcaaacgctgtttgctcctctacaaaacagaccttaaaaccctaaaggcttaagtagcaccctcgcaagctcgggcaaatcgctgaatattccttttgtctccgaccatcaggcacctgagtcgctgtctttttcgtgacattcagttcgctgcgctcacggctctggcagtgaatgggggtaaatggcactacaggcgccttttatggattcatgcaaggaaactacccataatacaagaaaagcccgtcacgggcttctcagggcgttttatggcgggtctgctatgtggtgctatctgactttttgctgttcagcagttcctgccctctgattttccagtctgaccacttcggattatcccgtgacaggtcattcagactggctaatgcacccagtaaggcagcggtatcatcaacaggcttacccgtcttactgtcaagaggacatccggtcaaataaaacgaaaggctcagtcgaaagactgggcctttcgttttgctgaggagacttagggaccctttatgacaacttgacggctacatcattcactttttcttcacaaccggcacggaactcgctcgggctggccccggtgcattttttaaatacccgcgagaaatagagttgatcgtcaaaaccaacattgcgaccgacggtggcgataggcatccgggtggtgctcaaaagcagcttcgcctggctgatacgttggtcctcgcgccagcttaagacgctaatccctaactgctggcggaaaagatgtgacagacgcgacggcgacaagcaaacatgctgtgcgacgctggcgatatcaaaattgctgtctgccaggtgatcgctgatgtactgacaagcctcgcgtacccgattatccatcggtggatggagcgactcgttaatcgcttccatgcgccgcagtaacaattgctcaagcagatttatcgccagcagctccgaatagcgcccttccccttgcccggcgttaatgatttgcccaaacaggtcgctgaaatgcggctggtgcgcttcatccgggcgaaagaaccccgtattggcaaatattgacggccagttaagccattcatgccagtaggcgcgcggacgaaagtaaacccactggtgataccattcgcgagcctccggatgacgaccgtagtgatgaatctctcctggcgggaacagcaaaatatcacccggtcggcaaacaaattctcgtccctgatttttcaccaccccctgaccgcgaatggtgagattgagaatataacctttcattcccagcggtcggtcgataaaaaaatcgagataaccgttggcctcaatcggcgttaaacccgccaccagatgggcattaaacgagtatcccggcagcaggggatcattttgcgcttcagccatacttttcatactcccaccattcagagaagaaaccaattgtccatattgcatcagacattgccgtcactgcgtcttttactggctcttctcgctaacccaaccggtaaccccgcttattaaaagcattctgtaacaaagcgggaccaaagccatgacaaaaacgcgtaacaaaagtgtctataatcacggcagaaaagtccacattgattatttgcacggcgtcacactttgctatgccatagcatttttatccataagattagcggatcctacctgacgctttttatcgcaactctctactgtttctccatacccgttttacctgcaggtgcagtaagaatgcggagttttagcaatgcctaaaatgaaaactgtaagcggtgccgccaaacgttttaagaaaacgggttctggccgctttaaaagcaaacagtctcacttacgtcacattctgactaagaagagctctaagcgtaaacgtcaccttcgtggcaaaaaactggttcatgactctgataccaaattggttcagcgcatgttgccttacgtataagacttaggagactgattaatggctagagtaaaacgcggcactatcgcacgtgctcgtcacaaaaaagtcctcaagcaggcaaaaggttattacggcgcacgttcacgtgtatatcgcgtagcggtacaagctgtaactaaagctggtcaatatgcttaccgtgaccgtcgtcagcgcaagcgtcaattccgtcaactatggattgcacgtattaacgctgctgctcgtcaaaatggtatgtcatacagccgtttcatcaacggtttgaagaaagcgtctgttgaaatcgatcgtaagatccttgccgacatcgcagtacatgacaaagcagctttcagcgcactagtcgaagcggctaaaggcgcattagcttaattattaacgaggcagagcggagttaactatgtacgcggttttccaaagtggcggtaaacaacaccgtgtggccgaaggccaaaccgttcgtcttgaaaaaatcgaagtagccccaggcgaaacggttgaatttgacaaagttttaatggtaagcaacggtgacgacgtaaaaatcggcacaccaatcgttgctggtggtaaggtgactgctgaggttgttacacacggtcgtggcgataaagtaaaaatcgttaagttccgtcgtcgtaagcactctcgtaagcaagcgggtcaccgtcagtggttcacagaagtgaaaatcactggtatcaacgcataataggagcacgaacacatggcacacaaaaaagctggtggtagtaccaaaaacggtcgtgattcagaaagtaaacgcctaggtgttaagcgctttggtggtgaatctgttcttgctggtaacatcattgttcgtcaacgtggtactcgtttccacgctggtgacaacatgggtatcggtaaagaccacacgttgtttgcactaaaagacggtaaagttcagttcgacgttaaaggaccgaagaaccgtaaatttgtaagcatcgtagctgagtaagcgcgtaatatatttttggagacagacaatgtctgaagcaaatttcaaactagacgcttctgttcgtacagacctagggaaaggtgcgagccgccgcctacgtcgcgaagataagcttcctggtatcatctacggtggtgaagaagcaccagtttctatcacactagatcataacaaagtaaacaactctgctgactttgaagcgttttattctcacgttcttgagattaaccttgacggtaaagttgttgaagttctagttaaagatatgcaacgtcacccgttcaagccaaagatcacacacattgacttccaacgtgtaatcgctggtcaagacgttcacactaacgtaccacttcacttcgtaaatgaagagaaatctgctgctgttaaagctggcggtattgctgagcaccacgtaactgaaatcgaagttacttgtctacctaagaaccttcctgagttcatcgaagtagacatggctggtgttgaaatgggtcaaacgctacacctttctgacctaactcttccagctggcgtttcttcagttgaacttgcgaagaacgacgaagctcacgacctagcggttgtaactgttaagcctgctcctaaagcggctgacgcagaagaagacggcgaagaagcagcttctgaggaataatcctgttgttgttctggagacaaatacaatgtcaagagtatgccaagtaacaggtaagcgtccaacggttggtaataaccgttcacacgcaagaaatgcgactcgtcgtcgctttttgccaaaccttcaaacacaccgtttttgggttgagagcgaaaaccgttttgtaaaactacgtttgtctgcaaaaggcatgcgtatcatcgacaagaaaggtattgattcagtactaactgacatccgtacccgtggtgagaaaatctaaggaagccgacaatgcgtgataaaattaaactagtttcttcagcaggtacaggtttcttctacactactgataaaaacaagcgtaacatgcctggcaaaatggagatcaaaaagtatgatcccgttgtgcgtaagcacgttatgttcaaagaggccaaaatcaagtaattagcttgacttaattaacggcactcctcagccaagtcaaaagcctccggtcggaggcttttgactacatgcccatggcgtttacgccccgccctgccactcatcgcagtactgttgtaattcattaagcattctgccgacatggaagccatcacaaacggcatgatgaacctgaatcgccagcggcatcagcaccttgtcgccttgcgtataatatttgcccatagtgaaaacgggggcgaagaagttgtccatattggccacgtttaaatcaaaactggtgaaactcacccagggattggctgagacgaaaaacatattctcaataaaccctttagggaaataggccaggttttcaccgtaacacgccacatcttgcgaatatatgtgtagaaactgccggaaatcgtcgtggtattcactccagagcgatgaaaacgtttcagtttgctcatggaaaacggtgtaacaagggtgaacactatcccatatcaccagctcaccgtctttcattgccatacggaactccggatgagcattcatcaggcgggcaagaatgtgaataaaggccggataaaacttgtgcttatttttctttacggtctttaaaaaggccgtaatatccagctgaacggtctggttataggtacattgagcaactgactgaaatgcctcaaaatgttctttacgatgccattgggatatatcaacggtggtatatccagtgatttttttctccattttagcttccttagctcctgaaaatctcgataactcaaaaaatacgcccggtagtgatcttatttcattatggtgaaagttggaacctcttacgtgccaagccaaataggccgt

SEQ ID NO: 292 - DNA, 5983 bp, Artificial
  Synthetic
tcagatccttccgtatttagccagtatgttctctagtgtggttcgttgtttttgcgtgagccatgagaacgaaccattgagatcatgcttactttgcatgtcactcaaaaattttgcctcaaaactggtgagctgaatttttgcagttaaagcatcgtgtagtgtttttcttagtccgttacgtaggtaggaatctgatgtaatggttgttggtattttgtcaccattcatttttatctggttgttctcaagttcggttacgagatccatttgtctatctagttcaacttggaaaatcaacgtatcagtcgggcggcctcgcttatcaaccaccaatttcatattgctgtaagtgtttaaatctttacttattggtttcaaaacccattggttaagccttttaaactcatggtagttattttcaagcattaacatgaacttaaattcatcaaggctaatctctatatttgccttgtgagttttcttttgtgttagttcttttaataaccactcataaatcctcatagagtatttgttttcaaaagacttaacatgttccagattatattttatgaatttttttaactggaaaagataaggcaatatctcttcactaaaaactaattctaatttttcgcttgagaacttggcatagtttgtccactggaaaatcttaaagcctttaaccaaaggattcctgatttccacagttctcgtcatcagctctctggttgctttagctaatacaccataagcattttccctactgatgttcatcatctgagcgtattggttataagtgaacgataccgtccgttctttccttgtagggttttcaatcgtggggttgagtagtgccacacagcataaaattagcttggtttcatgctccgttaagtcatagcgactaatcgctagttcatttgctttgaaaacaactaattcagacatacatctcaattggtctaggtgattttaatcactataccaattgagatgggctagtcaatgataattactagtccttttcctttgagttgtgggtatctgtaaattctgctagacctttgctggaaaacttgtaaattctgctagaccctctgtaaattccgctagacctttgtgtgttttttttgtttatattcaagtggttataatttatagaataaagaaagaataaaaaaagataaaaagaatagatcccagccctgtgtataactcactactttagtcagttccgcagtattacaaaaggatgtcgcaaacgctgtttgctcctctacaaaacagaccttaaaaccctaaaggcttaagtagcaccctcgcaagctcgggcaaatcgctgaatattccttttgtctccgaccatcaggcacctgagtcgctgtctttttcgtgacattcagttcgctgcgctcacggctctggcagtgaatgggggtaaatggcactacaggcgccttttatggattcatgcaaggaaactacccataatacaagaaaagcccgtcacgggcttctcagggcgttttatggcgggtctgctatgtggtgctatctgactttttgctgttcagcagttcctgccctctgattttccagtctgaccacttcggattatcccgtgacaggtcattcagactggctaatgcacccagtaaggcagcggtatcatcaacaggcttacccgtcttactgtcaagaggacatccggtcaaataaaacgaaaggctcagtcgaaagactgggcctttcgttttgctgaggagacttagggaccctttatgacaacttgacggctacatcattcactttttcttcacaaccggcacggaactcgctcgggctggccccggtgcattttttaaatacccgcgagaaatagagttgatcgtcaaaaccaacattgcgaccgacggtggcgataggcatccgggtggtgctcaaaagcagcttcgcctggctgatacgttggtcctcgcgccagcttaagacgctaatccctaactgctggcggaaaagatgtgacagacgcgacggcgacaagcaaacatgctgtgcgacgctggcgatatcaaaattgctgtctgccaggtgatcgctgatgtactgacaagcctcgcgtacccgattatccatcggtggatggagcgactcgttaatcgcttccatgcgccgcagtaacaattgctcaagcagatttatcgccagcagctccgaatagcgcccttccccttgcccggcgttaatgatttgcccaaacaggtcgctgaaatgcggctggtgcgcttcatccgggcgaaagaaccccgtattggcaaatattgacggccagttaagccattcatgccagtaggcgcgcggacgaaagtaaacccactggtgataccattcgcgagcctccggatgacgaccgtagtgatgaatctctcctggcgggaacagcaaaatatcacccggtcggcaaacaaattctcgtccctgatttttcaccaccccctgaccgcgaatggtgagattgagaatataacctttcattcccagcggtcggtcgataaaaaaatcgagataaccgttggcctcaatcggcgttaaacccgccaccagatgggcattaaacgagtatcccggcagcaggggatcattttgcgcttcagccatacttttcatactcccaccattcagagaagaaaccaattgtccatattgcatcagacattgccgtcactgcgtcttttactggctcttctcgctaacccaaccggtaaccccgcttattaaaagcattctgtaacaaagcgggaccaaagccatgacaaaaacgcgtaacaaaagtgtctataatcacggcagaaaagtccacattgattatttgcacggcgtcacactttgctatgccatagcatttttatccataagattagcggatcctacctgacgctttttatcgcaactctctactgtttctccatacccgttttacctgcaggtgcagtaagaatgcggagttttagcaatgcctaaaatgaaaactgtaagcggtgccgccaaacgttttaagaaaacgggttctggccgctttaaaagcaaacagtctcacttacgtcacattctgactaagaagagctctaagcgtaaacgtcaccttcgtggcaaaaaactggttcatgactctgataccaaattggttcagcgcatgttgccttacgtataagacttaggagactgattaatggctagagtaaaacgcggcactatcgcacgtgctcgtcacaaaaaagtcctcaagcaggcaaaaggttattacggcgcacgttcacgtgtatatcgcgtagcggtacaagctgtaactaaagctggtcaatatgcttaccgtgaccgtcgtcagcgcaagcgtcaattccgtcaactatggattgcacgtattaacgctgctgctcgtcaaaatggtatgtcatacagccgtttcatcaacggtttgaagaaagcgtctgttgaaatcgatcgtaagatccttgccgacatcgcagtacatgacaaagcagctttcagcgcactagtcgaagcggctaaaggcgcattagcttaattattaacgaggcagagcggagttaactatgtacgcggttttccaaagtggcggtaaacaacaccgtgtggccgaaggccaaaccgttcgtcttgaaaaaatcgaagtagccccaggcgaaacggttgaatttgacaaagttttaatggtaagcaacggtgacgacgtaaaaatcggcacaccaatcgttgctggtggtaaggtgactgctgaggttgttacacacggtcgtggcgataaagtaaaaatcgttaagttccgtcgtcgtaagcactctcgtaagcaagcgggtcaccgtcagtggttcacagaagtgaaaatcactggtatcaacgcataataggagcacgaacacatggcacacaaaaaagctggtggtagtaccaaaaacggtcgtgattcagaaagtaaacgcctaggtgttaagcgctttggtggtgaatctgttcttgctggtaacatcattgttcgtcaacgtggtactcgtttccacgctggtgacaacatgggtatcggtaaagaccacacgttgtttgcactaaaagacggtaaagttcagttcgacgttaaaggaccgaagaaccgtaaatttgtaagcatcgtagctgagtaagcgcgtaatatatttttggagacagacaatgtctgaagcaaatttcaaactagacgcttctgttcgtacagacctagggaaaggtgcgagccgccgcctacgtcgcgaagataagcttcctggtatcatctacggtggtgaagaagcaccagtttctatcacactagatcataacaaagtaaacaactctgctgactttgaagcgttttattctcacgttcttgagattaaccttgacggtaaagtcgttgaagttctagttaaagatatgcaacgtcacccgttcaagccaaagatcacacacattgacttccaacgtgtaatcgctggtcaagacgttcacactaacgtaccacttcacttcgtaaatgaagagaaatctgctgctgttaaagctggcggtattgctgagcaccacgtaactgaaatcgaagttacttgtctacctaagaaccttcctgagttcatcgaagtagacatggctggtgttgaaatgggtcaaacgctacacctttctgacctaactcttccagctggcgtttcttcagttgaacttgcgaagaacgacgaagctcacgacctagcggttgtaactgttaagcctgctcctaaagcggctgacgcagaagaagacggcgaagaagcagcttctgaggaataatcctgttgttgttctggagacaaatacaatgtcaagagtatgccaagtaacaggtaagcgtccaacggttggtaataaccgttcacacgcaagaaatgcgactcgtcgtcgctttttgccaaaccttcaaacacaccgtttttgggttgagagcgaaaaccgttttgtaaaactacgtttgtctgcaaaaggcatgcgtatcatcgacaagaaaggtattgattcagtactaactgacatccgtacccgtggtgagaaaatctaaggaagccgacttaattaacggcactcctcagccaagtcaaaagcctccggtcggaggcttttgactacatgcccatggcgtttacgccccgccctgccactcatcgcagtactgttgtaattcattaagcattctgccgacatggaagccatcacaaacggcatgatgaacctgaatcgccagcggcatcagcaccttgtcgccttgcgtataatatttgcccatagtgaaaacgggggcgaagaagttgtccatattggccacgtttaaatcaaaactggtgaaactcacccagggattggctgagacgaaaaacatattctcaataaaccctttagggaaataggccaggttttcaccgtaacacgccacatcttgcgaatatatgtgtagaaactgccggaaatcgtcgtggtattcactccagagcgatgaaaacgtttcagtttgctcatggaaaacggtgtaacaagggtgaacactatcccatatcaccagctcaccgtctttcattgccatacggaactccggatgagcattcatcaggcgggcaagaatgtgaataaaggccggataaaacttgtgcttatttttctttacggtctttaaaaaggccgtaatatccagctgaacggtctggttataggtacattgagcaactgactgaaatgcctcaaaatgttctttacgatgccattgggatatatcaacggtggtatatccagtgatttttttctccattttagcttccttagctcctgaaaatctcgataactcaaaaaatacgcccggtagtgatcttatttcattatggtgaaagttggaacctcttacgtgccaagccaaataggccgt

SEQ ID NO: 293 - DNA, 5718 bp, Artificial
  Synthetic
tcagatccttccgtatttagccagtatgttctctagtgtggttcgttgtttttgcgtgagccatgagaacgaaccattgagatcatgcttactttgcatgtcactcaaaaattttgcctcaaaactggtgagctgaatttttgcagttaaagcatcgtgtagtgtttttcttagtccgttacgtaggtaggaatctgatgtaatggttgttggtattttgtcaccattcatttttatctggttgttctcaagttcggttacgagatccatttgtctatctagttcaacttggaaaatcaacgtatcagtcgggcggcctcgcttatcaaccaccaatttcatattgctgtaagtgtttaaatctttacttattggtttcaaaacccattggttaagccttttaaactcatggtagttattttcaagcattaacatgaacttaaattcatcaaggctaatctctatatttgccttgtgagttttcttttgtgttagttcttttaataaccactcataaatcctcatagagtatttgttttcaaaagacttaacatgttccagattatattttatgaatttttttaactggaaaagataaggcaatatctcttcactaaaaactaattctaatttttcgcttgagaacttggcatagtttgtccactggaaaatcttaaagcctttaaccaaaggattcctgatttccacagttctcgtcatcagctctctggttgctttagctaatacaccataagcattttccctactgatgttcatcatctgagcgtattggttataagtgaacgataccgtccgttctttccttgtagggttttcaatcgtggggttgagtagtgccacacagcataaaattagcttggtttcatgctccgttaagtcatagcgactaatcgctagttcatttgctttgaaaacaactaattcagacatacatctcaattggtctaggtgattttaatcactataccaattgagatgggctagtcaatgataattactagtccttttcctttgagttgtgggtatctgtaaattctgctagacctttgctggaaaacttgtaaattctgctagaccctctgtaaattccgctagacctttgtgtgttttttttgtttatattcaagtggttataatttatagaataaagaaagaataaaaaaagataaaaagaatagatcccagccctgtgtataactcactactttagtcagttccgcagtattacaaaaggatgtcgcaaacgctgtttgctcctctacaaaacagaccttaaaaccctaaaggcttaagtagcaccctcgcaagctcgggcaaatcgctgaatattccttttgtctccgaccatcaggcacctgagtcgctgtctttttcgtgacattcagttcgctgcgctcacggctctggcagtgaatgggggtaaatggcactacaggcgccttttatggattcatgcaaggaaactacccataatacaagaaaagcccgtcacgggcttctcagggcgttttatggcgggtctgctatgtggtgctatctgactttttgctgttcagcagttcctgccctctgattttccagtctgaccacttcggattatcccgtgacaggtcattcagactggctaatgcacccagtaaggcagcggtatcatcaacaggcttacccgtcttactgtcaagaggacatccggtcaaataaaacgaaaggctcagtcgaaagactgggcctttcgttttgctgaggagacttagggaccctttatgacaacttgacggctacatcattcactttttcttcacaaccggcacggaactcgctcgggctggccccggtgcattttttaaatacccgcgagaaatagagttgatcgtcaaaaccaacattgcgaccgacggtggcgataggcatccgggtggtgctcaaaagcagcttcgcctggctgatacgttggtcctcgcgccagcttaagacgctaatccctaactgctggcggaaaagatgtgacagacgcgacggcgacaagcaaacatgctgtgcgacgctggcgatatcaaaattgctgtctgccaggtgatcgctgatgtactgacaagcctcgcgtacccgattatccatcggtggatggagcgactcgttaatcgcttccatgcgccgcagtaacaattgctcaagcagatttatcgccagcagctccgaatagcgcccttccccttgcccggcgttaatgatttgcccaaacaggtcgctgaaatgcggctggtgcgcttcatccgggcgaaagaaccccgtattggcaaatattgacggccagttaagccattcatgccagtaggcgcgcggacgaaagtaaacccactggtgataccattcgcgagcctccggatgacgaccgtagtgatgaatctctcctggcgggaacagcaaaatatcacccggtcggcaaacaaattctcgtccctgatttttcaccaccccctgaccgcgaatggtgagattgagaatataacctttcattcccagcggtcggtcgataaaaaaatcgagataaccgttggcctcaatcggcgttaaacccgccaccagatgggcattaaacgagtatcccggcagcaggggatcattttgcgcttcagccatacttttcatactcccaccattcagagaagaaaccaattgtccatattgcatcagacattgccgtcactgcgtcttttactggctcttctcgctaacccaaccggtaaccccgcttattaaaagcattctgtaacaaagcgggaccaaagccatgacaaaaacgcgtaacaaaagtgtctataatcacggcagaaaagtccacattgattatttgcacggcgtcacactttgctatgccatagcatttttatccataagattagcggatcctacctgacgctttttatcgcaactctctactgtttctccatacccgttttacctgcaggtgcagtaagaatgcggagttttagcaatgcctaaaatgaaaactgtaagcggtgccgccaaacgttttaagaaaacgggttctggccgctttaaaagcaaacagtctcacttacgtcacattctgactaagaagagctctaagcgtaaacgtcaccttcgtggcaaaaaactggttcatgactctgataccaaattggttcagcgcatgttgccttacgtataagacttaggagactgattaatggctagagtaaaacgcggcactatcgcacgtgctcgtcacaaaaaagtcctcaagcaggcaaaaggttattacggcgcacgttcacgtgtatatcgcgtagcggtacaagctgtaactaaagctggtcaatatgcttaccgtgaccgtcgtcagcgcaagcgtcaattccgtcaactatggattgcacgtattaacgctgctgctcgtcaaaatggtatgtcatacagccgtttcatcaacggtttgaagaaagcgtctgttgaaatcgatcgtaagatccttgccgacatcgcagtacatgacaaagcagctttcagcgcactagtcgaagcggctaaaggcgcattagcttaattattaacgaggcagagcggagttaactatgtacgcggttttccaaagtggcggtaaacaacaccgtgtggccgaaggccaaaccgttcgtcttgaaaaaatcgaagtagccccaggcgaaacggttgaatttgacaaagttttaatggtaagcaacggtgacgacgtaaaaatcggcacaccaatcgttgctggtggtaaggtgactgctgaggttgttacacacggtcgtggcgataaagtaaaaatcgttaagttccgtcgtcgtaagcactctcgtaagcaagcgggtcaccgtcagtggttcacagaagtgaaaatcactggtatcaacgcataataggagcacgaacacatggcacacaaaaaagctggtggtagtaccaaaaacggtcgtgattcagaaagtaaacgcctaggtgttaagcgctttggtggtgaatctgttcttgctggtaacatcattgttcgtcaacgtggtactcgtttccacgctggtgacaacatgggtatcggtaaagaccacacgttgtttgcactaaaagacggtaaagttcagttcgacgttaaaggaccgaagaaccgtaaatttgtaagcatcgtagctgagtaagcgcgtaatatatttttggagacagacaatgtctgaagcaaatttcaaactagacgcttctgttcgtacagacctagggaaaggtgcgagccgccgcctacgtcgcgaagataagcttcctggtatcatctacggtggtgaagaagcaccagtttctatcacactagatcataacaaagtaaacaactctgctgactttgaagcgttttattctcacgttcttgagattaaccttgacggtaaagtcgttgaagttctagttaaagatatgcaacgtcacccgttcaagccaaagatcacacacattgacttccaacgtgtaatcgctggtcaagacgttcacactaacgtaccacttcacttcgtaaatgaagagaaatctgctgctgttaaagctggcggtattgctgagcaccacgtaactgaaatcgaagttacttgtctacctaagaaccttcctgagttcatcgaagtagacatggctggtgttgaaatgggtcaaacgctacacctttctgacctaactcttccagctggcgtttcttcagttgaacttgcgaagaacgacgaagctcacgacctagcggttgtaactgttaagcctgctcctaaagcggctgacgcagaagaagacggcgaagaagcagcttctgaggaataatcctgttgacttaattaacggcactcctcagccaagtcaaaagcctccggtcggaggcttttgactacatgcccatggcgtttacgccccgccctgccactcatcgcagtactgttgtaattcattaagcattctgccgacatggaagccatcacaaacggcatgatgaacctgaatcgccagcggcatcagcaccttgtcgccttgcgtataatatttgcccatagtgaaaacgggggcgaagaagttgtccatattggccacgtttaaatcaaaactggtgaaactcacccagggattggctgagacgaaaaacatattctcaataaaccctttagggaaataggccaggttttcaccgtaacacgccacatcttgcgaatatatgtgtagaaactgccggaaatcgtcgtggtattcactccagagcgatgaaaacgtttcagtttgctcatggaaaacggtgtaacaagggtgaacactatcccatatcaccagctcaccgtctttcattgccatacggaactccggatgagcattcatcaggcgggcaagaatgtgaataaaggccggataaaacttgtgcttatttttctttacggtctttaaaaaggccgtaatatccagctgaacggtctggttataggtacattgagcaactgactgaaatgcctcaaaatgttctttacgatgccattgggatatatcaacggtggtatatccagtgatttttttctccattttagcttccttagctcctgaaaatctcgataactcaaaaaatacgcccggtagtgatcttatttcattatggtgaaagttggaacctcttacgtgccaagccaaataggccgt

SEQ ID NO: 294 - DNA, 5057 bp, Artificial
  Synthetic
tcagatccttccgtatttagccagtatgttctctagtgtggttcgttgtttttgcgtgagccatgagaacgaaccattgagatcatgcttactttgcatgtcactcaaaaattttgcctcaaaactggtgagctgaatttttgcagttaaagcatcgtgtagtgtttttcttagtccgttacgtaggtaggaatctgatgtaatggttgttggtattttgtcaccattcatttttatctggttgttctcaagttcggttacgagatccatttgtctatctagttcaacttggaaaatcaacgtatcagtcgggcggcctcgcttatcaaccaccaatttcatattgctgtaagtgtttaaatctttacttattggtttcaaaacccattggttaagccttttaaactcatggtagttattttcaagcattaacatgaacttaaattcatcaaggctaatctctatatttgccttgtgagttttcttttgtgttagttcttttaataaccactcataaatcctcatagagtatttgttttcaaaagacttaacatgttccagattatattttatgaatttttttaactggaaaagataaggcaatatctcttcactaaaaactaattctaatttttcgcttgagaacttggcatagtttgtccactggaaaatcttaaagcctttaaccaaaggattcctgatttccacagttctcgtcatcagctctctggttgctttagctaatacaccataagcattttccctactgatgttcatcatctgagcgtattggttataagtgaacgataccgtccgttctttccttgtagggttttcaatcgtggggttgagtagtgccacacagcataaaattagcttggtttcatgctccgttaagtcatagcgactaatcgctagttcatttgctttgaaaacaactaattcagacatacatctcaattggtctaggtgattttaatcactataccaattgagatgggctagtcaatgataattactagtccttttcctttgagttgtgggtatctgtaaattctgctagacctttgctggaaaacttgtaaattctgctagaccctctgtaaattccgctagacctttgtgtgttttttttgtttatattcaagtggttataatttatagaataaagaaagaataaaaaaagataaaaagaatagatcccagccctgtgtataactcactactttagtcagttccgcagtattacaaaaggatgtcgcaaacgctgtttgctcctctacaaaacagaccttaaaaccctaaaggcttaagtagcaccctcgcaagctcgggcaaatcgctgaatattccttttgtctccgaccatcaggcacctgagtcgctgtctttttcgtgacattcagttcgctgcgctcacggctctggcagtgaatgggggtaaatggcactacaggcgccttttatggattcatgcaaggaaactacccataatacaagaaaagcccgtcacgggcttctcagggcgttttatggcgggtctgctatgtggtgctatctgactttttgctgttcagcagttcctgccctctgattttccagtctgaccacttcggattatcccgtgacaggtcattcagactggctaatgcacccagtaaggcagcggtatcatcaacaggcttacccgtcttactgtcaagaggacatccggtcaaataaaacgaaaggctcagtcgaaagactgggcctttcgttttgctgaggagacttagggaccctttatgacaacttgacggctacatcattcactttttcttcacaaccggcacggaactcgctcgggctggccccggtgcattttttaaatacccgcgagaaatagagttgatcgtcaaaaccaacattgcgaccgacggtggcgataggcatccgggtggtgctcaaaagcagcttcgcctggctgatacgttggtcctcgcgccagcttaagacgctaatccctaactgctggcggaaaagatgtgacagacgcgacggcgacaagcaaacatgctgtgcgacgctggcgatatcaaaattgctgtctgccaggtgatcgctgatgtactgacaagcctcgcgtacccgattatccatcggtggatggagcgactcgttaatcgcttccatgcgccgcagtaacaattgctcaagcagatttatcgccagcagctccgaatagcgcccttccccttgcccggcgttaatgatttgcccaaacaggtcgctgaaatgcggctggtgcgcttcatccgggcgaaagaaccccgtattggcaaatattgacggccagttaagccattcatgccagtaggcgcgcggacgaaagtaaacccactggtgataccattcgcgagcctccggatgacgaccgtagtgatgaatctctcctggcgggaacagcaaaatatcacccggtcggcaaacaaattctcgtccctgatttttcaccaccccctgaccgcgaatggtgagattgagaatataacctttcattcccagcggtcggtcgataaaaaaatcgagataaccgttggcctcaatcggcgttaaacccgccaccagatgggcattaaacgagtatcccggcagcaggggatcattttgcgcttcagccatacttttcatactcccaccattcagagaagaaaccaattgtccatattgcatcagacattgccgtcactgcgtcttttactggctcttctcgctaacccaaccggtaaccccgcttattaaaagcattctgtaacaaagcgggaccaaagccatgacaaaaacgcgtaacaaaagtgtctataatcacggcagaaaagtccacattgattatttgcacggcgtcacactttgctatgccatagcatttttatccataagattagcggatcctacctgacgctttttatcgcaactctctactgtttctccatacccgttttacctgcaggtgcagtaagaatgcggagttttagcaatgcctaaaatgaaaactgtaagcggtgccgccaaacgttttaagaaaacgggttctggccgctttaaaagcaaacagtctcacttacgtcacattctgactaagaagagctctaagcgtaaacgtcaccttcgtggcaaaaaactggttcatgactctgataccaaattggttcagcgcatgttgccttacgtataagacttaggagactgattaatggctagagtaaaacgcggcactatcgcacgtgctcgtcacaaaaaagtcctcaagcaggcaaaaggttattacggcgcacgttcacgtgtatatcgcgtagcggtacaagctgtaactaaagctggtcaatatgcttaccgtgaccgtcgtcagcgcaagcgtcaattccgtcaactatggattgcacgtattaacgctgctgctcgtcaaaatggtatgtcatacagccgtttcatcaacggtttgaagaaagcgtctgttgaaatcgatcgtaagatccttgccgacatcgcagtacatgacaaagcagctttcagcgcactagtcgaagcggctaaaggcgcattagcttaattattaacgaggcagagcggagttaactatgtacgcggttttccaaagtggcggtaaacaacaccgtgtggccgaaggccaaaccgttcgtcttgaaaaaatcgaagtagccccaggcgaaacggttgaatttgacaaagttttaatggtaagcaacggtgacgacgtaaaaatcggcacaccaatcgttgctggtggtaaggtgactgctgaggttgttacacacggtcgtggcgataaagtaaaaatcgttaagttccgtcgtcgtaagcactctcgtaagcaagcgggtcaccgtcagtggttcacagaagtgaaaatcactggtatcaacgcataataggagcacgaacacatggcacacaaaaaagctggtggtagtaccaaaaacggtcgtgattcagaaagtaaacgcctaggtgttaagcgctttggtggtgaatctgttcttgctggtaacatcattgttcgtcaacgtggtactcgtttccacgctggtgacaacatgggtatcggtaaagaccacacgttgtttgcactaaaagacggtaaagttcagttcgacgttaaaggaccgaagaaccgtaaatttgtaagcatcgtagctgagtaagcgcgtaaacttaattaacggcactcctcagccaagtcaaaagcctccggtcggaggcttttgactacatgcccatggcgtttacgccccgccctgccactcatcgcagtactgttgtaattcattaagcattctgccgacatggaagccatcacaaacggcatgatgaacctgaatcgccagcggcatcagcaccttgtcgccttgcgtataatatttgcccatagtgaaaacgggggcgaagaagttgtccatattggccacgtttaaatcaaaactggtgaaactcacccagggattggctgagacgaaaaacatattctcaataaaccctttagggaaataggccaggttttcaccgtaacacgccacatcttgcgaatatatgtgtagaaactgccggaaatcgtcgtggtattcactccagagcgatgaaaacgtttcagtttgctcatggaaaacggtgtaacaagggtgaacactatcccatatcaccagctcaccgtctttcattgccatacggaactccggatgagcattcatcaggcgggcaagaatgtgaataaaggccggataaaacttgtgcttatttttctttacggtctttaaaaaggccgtaatatccagctgaacggtctggttataggtacattgagcaactgactgaaatgcctcaaaatgttctttacgatgccattgggatatatcaacggtggtatatccagtgatttttttctccattttagcttccttagctcctgaaaatctcgataactcaaaaaatacgcccggtagtgatcttatttcattatggtgaaagttggaacctcttacgtgccaagccaaataggccgt

SEQ ID NO: 295 - DNA, 4784 bp, Artificial
  Synthetic
tcagatccttccgtatttagccagtatgttctctagtgtggttcgttgtttttgcgtgagccatgagaacgaaccattgagatcatgcttactttgcatgtcactcaaaaattttgcctcaaaactggtgagctgaatttttgcagttaaagcatcgtgtagtgtttttcttagtccgttacgtaggtaggaatctgatgtaatggttgttggtattttgtcaccattcatttttatctggttgttctcaagttcggttacgagatccatttgtctatctagttcaacttggaaaatcaacgtatcagtcgggcggcctcgcttatcaaccaccaatttcatattgctgtaagtgtttaaatctttacttattggtttcaaaacccattggttaagccttttaaactcatggtagttattttcaagcattaacatgaacttaaattcatcaaggctaatctctatatttgccttgtgagttttcttttgtgttagttcttttaataaccactcataaatcctcatagagtatttgttttcaaaagacttaacatgttccagattatattttatgaatttttttaactggaaaagataaggcaatatctcttcactaaaaactaattctaatttttcgcttgagaacttggcatagtttgtccactggaaaatcttaaagcctttaaccaaaggattcctgatttccacagttctcgtcatcagctctctggttgctttagctaatacaccataagcattttccctactgatgttcatcatctgagcgtattggttataagtgaacgataccgtccgttctttccttgtagggttttcaatcgtggggttgagtagtgccacacagcataaaattagcttggtttcatgctccgttaagtcatagcgactaatcgctagttcatttgctttgaaaacaactaattcagacatacatctcaattggtctaggtgattttaatcactataccaattgagatgggctagtcaatgataattactagtccttttcctttgagttgtgggtatctgtaaattctgctagacctttgctggaaaacttgtaaattctgctagaccctctgtaaattccgctagacctttgtgtgttttttttgtttatattcaagtggttataatttatagaataaagaaagaataaaaaaagataaaaagaatagatcccagccctgtgtataactcactactttagtcagttccgcagtattacaaaaggatgtcgcaaacgctgtttgctcctctacaaaacagaccttaaaaccctaaaggcttaagtagcaccctcgcaagctcgggcaaatcgctgaatattccttttgtctccgaccatcaggcacctgagtcgctgtctttttcgtgacattcagttcgctgcgctcacggctctggcagtgaatgggggtaaatggcactacaggcgccttttatggattcatgcaaggaaactacccataatacaagaaaagcccgtcacgggcttctcagggcgttttatggcgggtctgctatgtggtgctatctgactttttgctgttcagcagttcctgccctctgattttccagtctgaccacttcggattatcccgtgacaggtcattcagactggctaatgcacccagtaaggcagcggtatcatcaacaggcttacccgtcttactgtcaagaggacatccggtcaaataaaacgaaaggctcagtcgaaagactgggcctttcgttttgctgaggagacttagggaccctttatgacaacttgacggctacatcattcactttttcttcacaaccggcacggaactcgctcgggctggccccggtgcattttttaaatacccgcgagaaatagagttgatcgtcaaaaccaacattgcgaccgacggtggcgataggcatccgggtggtgctcaaaagcagcttcgcctggctgatacgttggtcctcgcgccagcttaagacgctaatccctaactgctggcggaaaagatgtgacagacgcgacggcgacaagcaaacatgctgtgcgacgctggcgatatcaaaattgctgtctgccaggtgatcgctgatgtactgacaagcctcgcgtacccgattatccatcggtggatggagcgactcgttaatcgcttccatgcgccgcagtaacaattgctcaagcagatttatcgccagcagctccgaatagcgcccttccccttgcccggcgttaatgatttgcccaaacaggtcgctgaaatgcggctggtgcgcttcatccgggcgaaagaaccccgtattggcaaatattgacggccagttaagccattcatgccagtaggcgcgcggacgaaagtaaacccactggtgataccattcgcgagcctccggatgacgaccgtagtgatgaatctctcctggcgggaacagcaaaatatcacccggtcggcaaacaaattctcgtccctgatttttcaccaccccctgaccgcgaatggtgagattgagaatataacctttcattcccagcggtcggtcgataaaaaaatcgagataaccgttggcctcaatcggcgttaaacccgccaccagatgggcattaaacgagtatcccggcagcaggggatcattttgcgcttcagccatacttttcatactcccaccattcagagaagaaaccaattgtccatattgcatcagacattgccgtcactgcgtcttttactggctcttctcgctaacccaaccggtaaccccgcttattaaaagcattctgtaacaaagcgggaccaaagccatgacaaaaacgcgtaacaaaagtgtctataatcacggcagaaaagtccacattgattatttgcacggcgtcacactttgctatgccatagcatttttatccataagattagcggatcctacctgacgctttttatcgcaactctctactgtttctccatacccgttttacctgcaggtgcagtaagaatgcggagttttagcaatgcctaaaatgaaaactgtaagcggtgccgccaaacgttttaagaaaacgggttctggccgctttaaaagcaaacagtctcacttacgtcacattctgactaagaagagctctaagcgtaaacgtcaccttcgtggcaaaaaactggttcatgactctgataccaaattggttcagcgcatgttgccttacgtataagacttaggagactgattaatggctagagtaaaacgcggcactatcgcacgtgctcgtcacaaaaaagtcctcaagcaggcaaaaggttattacggcgcacgttcacgtgtatatcgcgtagcggtacaagctgtaactaaagctggtcaatatgcttaccgtgaccgtcgtcagcgcaagcgtcaattccgtcaactatggattgcacgtattaacgctgctgctcgtcaaaatggtatgtcatacagccgtttcatcaacggtttgaagaaagcgtctgttgaaatcgatcgtaagatccttgccgacatcgcagtacatgacaaagcagctttcagcgcactagtcgaagcggctaaaggcgcattagcttaattattaacgaggcagagcggagttaactatgtacgcggttttccaaagtggcggtaaacaacaccgtgtggccgaaggccaaaccgttcgtcttgaaaaaatcgaagtagccccaggcgaaacggttgaatttgacaaagttttaatggtaagcaacggtgacgacgtaaaaatcggcacaccaatcgttgctggtggtaaggtgactgctgaggttgttacacacggtcgtggcgataaagtaaaaatcgttaagttccgtcgtcgtaagcactctcgtaagcaagcgggtcaccgtcagtggttcacagaagtgaaaatcactggtatcaacgcataataggagcaacttaattaacggcactcctcagccaagtcaaaagcctccggtcggaggcttttgactacatgcccatggcgtttacgccccgccctgccactcatcgcagtactgttgtaattcattaagcattctgccgacatggaagccatcacaaacggcatgatgaacctgaatcgccagcggcatcagcaccttgtcgccttgcgtataatatttgcccatagtgaaaacgggggcgaagaagttgtccatattggccacgtttaaatcaaaactggtgaaactcacccagggattggctgagacgaaaaacatattctcaataaaccctttagggaaataggccaggttttcaccgtaacacgccacatcttgcgaatatatgtgtagaaactgccggaaatcgtcgtggtattcactccagagcgatgaaaacgtttcagtttgctcatggaaaacggtgtaacaagggtgaacactatcccatatcaccagctcaccgtctttcattgccatacggaactccggatgagcattcatcaggcgggcaagaatgtgaataaaggccggataaaacttgtgcttatttttctttacggtctttaaaaaggccgtaatatccagctgaacggtctggttataggtacattgagcaactgactgaaatgcctcaaaatgttctttacgatgccattgggatatatcaacggtggtatatccagtgatttttttctccattttagcttccttagctcctgaaaatctcgataactcaaaaaatacgcccggtagtgatcttatttcattatggtgaaagttggaacctcttacgtgccaagccaaataggccgt

SEQ ID NO: 296 - DNA, 4444 bp, Artificial
  Synthetic
tcagatccttccgtatttagccagtatgttctctagtgtggttcgttgtttttgcgtgagccatgagaacgaaccattgagatcatgcttactttgcatgtcactcaaaaattttgcctcaaaactggtgagctgaatttttgcagttaaagcatcgtgtagtgtttttcttagtccgttacgtaggtaggaatctgatgtaatggttgttggtattttgtcaccattcatttttatctggttgttctcaagttcggttacgagatccatttgtctatctagttcaacttggaaaatcaacgtatcagtcgggcggcctcgcttatcaaccaccaatttcatattgctgtaagtgtttaaatctttacttattggtttcaaaacccattggttaagccttttaaactcatggtagttattttcaagcattaacatgaacttaaattcatcaaggctaatctctatatttgccttgtgagttttcttttgtgttagttcttttaataaccactcataaatcctcatagagtatttgttttcaaaagacttaacatgttccagattatattttatgaatttttttaactggaaaagataaggcaatatctcttcactaaaaactaattctaatttttcgcttgagaacttggcatagtttgtccactggaaaatcttaaagcctttaaccaaaggattcctgatttccacagttctcgtcatcagctctctggttgctttagctaatacaccataagcattttccctactgatgttcatcatctgagcgtattggttataagtgaacgataccgtccgttctttccttgtagggttttcaatcgtggggttgagtagtgccacacagcataaaattagcttggtttcatgctccgttaagtcatagcgactaatcgctagttcatttgctttgaaaacaactaattcagacatacatctcaattggtctaggtgattttaatcactataccaattgagatgggctagtcaatgataattactagtccttttcctttgagttgtgggtatctgtaaattctgctagacctttgctggaaaacttgtaaattctgctagaccctctgtaaattccgctagacctttgtgtgttttttttgtttatattcaagtggttataatttatagaataaagaaagaataaaaaaagataaaaagaatagatcccagccctgtgtataactcactactttagtcagttccgcagtattacaaaaggatgtcgcaaacgctgtttgctcctctacaaaacagaccttaaaaccctaaaggcttaagtagcaccctcgcaagctcgggcaaatcgctgaatattccttttgtctccgaccatcaggcacctgagtcgctgtctttttcgtgacattcagttcgctgcgctcacggctctggcagtgaatgggggtaaatggcactacaggcgccttttatggattcatgcaaggaaactacccataatacaagaaaagcccgtcacgggcttctcagggcgttttatggcgggtctgctatgtggtgctatctgactttttgctgttcagcagttcctgccctctgattttccagtctgaccacttcggattatcccgtgacaggtcattcagactggctaatgcacccagtaaggcagcggtatcatcaacaggcttacccgtcttactgtcaagaggacatccggtcaaataaaacgaaaggctcagtcgaaagactgggcctttcgttttgctgaggagacttagggaccctttatgacaacttgacggctacatcattcactttttcttcacaaccggcacggaactcgctcgggctggccccggtgcattttttaaatacccgcgagaaatagagttgatcgtcaaaaccaacattgcgaccgacggtggcgataggcatccgggtggtgctcaaaagcagcttcgcctggctgatacgttggtcctcgcgccagcttaagacgctaatccctaactgctggcggaaaagatgtgacagacgcgacggcgacaagcaaacatgctgtgcgacgctggcgatatcaaaattgctgtctgccaggtgatcgctgatgtactgacaagcctcgcgtacccgattatccatcggtggatggagcgactcgttaatcgcttccatgcgccgcagtaacaattgctcaagcagatttatcgccagcagctccgaatagcgcccttccccttgcccggcgttaatgatttgcccaaacaggtcgctgaaatgcggctggtgcgcttcatccgggcgaaagaaccccgtattggcaaatattgacggccagttaagccattcatgccagtaggcgcgcggacgaaagtaaacccactggtgataccattcgcgagcctccggatgacgaccgtagtgatgaatctctcctggcgggaacagcaaaatatcacccggtcggcaaacaaattctcgtccctgatttttcaccaccccctgaccgcgaatggtgagattgagaatataacctttcattcccagcggtcggtcgataaaaaaatcgagataaccgttggcctcaatcggcgttaaacccgccaccagatgggcattaaacgagtatcccggcagcaggggatcattttgcgcttcagccatacttttcatactcccaccattcagagaagaaaccaattgtccatattgcatcagacattgccgtcactgcgtcttttactggctcttctcgctaacccaaccggtaaccccgcttattaaaagcattctgtaacaaagcgggaccaaagccatgacaaaaacgcgtaacaaaagtgtctataatcacggcagaaaagtccacattgattatttgcacggcgtcacactttgctatgccatagcatttttatccataagattagcggatcctacctgacgctttttatcgcaactctctactgtttctccatacccgttttacctgcaggtgcagtaagaatgcggagttttagcaatgcctaaaatgaaaactgtaagcggtgccgccaaacgttttaagaaaacgggttctggccgctttaaaagcaaacagtctcacttacgtcacattctgactaagaagagctctaagcgtaaacgtcaccttcgtggcaaaaaactggttcatgactctgataccaaattggttcagcgcatgttgccttacgtataagacttaggagactgattaatggctagagtaaaacgcggcactatcgcacgtgctcgtcacaaaaaagtcctcaagcaggcaaaaggttattacggcgcacgttcacgtgtatatcgcgtagcggtacaagctgtaactaaagctggtcaatatgcttaccgtgaccgtcgtcagcgcaagcgtcaattccgtcaactatggattgcacgtattaacgctgctgctcgtcaaaatggtatgtcatacagccgtttcatcaacggtttgaagaaagcgtctgttgaaatcgatcgtaagatccttgccgacatcgcagtacatgacaaagcagctttcagcgcactagtcgaagcggctaaaggcgcattagcttaattattaacacttaattaacggcactcctcagccaagtcaaaagcctccggtcggaggcttttgactacatgcccatggcgtttacgccccgccctgccactcatcgcagtactgttgtaattcattaagcattctgccgacatggaagccatcacaaacggcatgatgaacctgaatcgccagcggcatcagcaccttgtcgccttgcgtataatatttgcccatagtgaaaacgggggcgaagaagttgtccatattggccacgtttaaatcaaaactggtgaaactcacccagggattggctgagacgaaaaacatattctcaataaaccctttagggaaataggccaggttttcaccgtaacacgccacatcttgcgaatatatgtgtagaaactgccggaaatcgtcgtggtattcactccagagcgatgaaaacgtttcagtttgctcatggaaaacggtgtaacaagggtgaacactatcccatatcaccagctcaccgtctttcattgccatacggaactccggatgagcattcatcaggcgggcaagaatgtgaataaaggccggataaaacttgtgcttatttttctttacggtctttaaaaaggccgtaatatccagctgaacggtctggttataggtacattgagcaactgactgaaatgcctcaaaatgttctttacgatgccattgggatatatcaacggtggtatatccagtgatttttttctccattttagcttccttagctcctgaaaatctcgataactcaaaaaatacgcccggtagtgatcttatttcattatggtgaaagttggaacctcttacgtgccaagccaaataggccgt

SEQ ID NO: 297 - DNA, 4707 bp, Artificial
  Synthetic
tcagatccttccgtatttagccagtatgttctctagtgtggttcgttgtttttgcgtgagccatgagaacgaaccattgagatcatgcttactttgcatgtcactcaaaaattttgcctcaaaactggtgagctgaatttttgcagttaaagcatcgtgtagtgtttttcttagtccgttacgtaggtaggaatctgatgtaatggttgttggtattttgtcaccattcatttttatctggttgttctcaagttcggttacgagatccatttgtctatctagttcaacttggaaaatcaacgtatcagtcgggcggcctcgcttatcaaccaccaatttcatattgctgtaagtgtttaaatctttacttattggtttcaaaacccattggttaagccttttaaactcatggtagttattttcaagcattaacatgaacttaaattcatcaaggctaatctctatatttgccttgtgagttttcttttgtgttagttcttttaataaccactcataaatcctcatagagtatttgttttcaaaagacttaacatgttccagattatattttatgaatttttttaactggaaaagataaggcaatatctcttcactaaaaactaattctaatttttcgcttgagaacttggcatagtttgtccactggaaaatcttaaagcctttaaccaaaggattcctgatttccacagttctcgtcatcagctctctggttgctttagctaatacaccataagcattttccctactgatgttcatcatctgagcgtattggttataagtgaacgataccgtccgttctttccttgtagggttttcaatcgtggggttgagtagtgccacacagcataaaattagcttggtttcatgctccgttaagtcatagcgactaatcgctagttcatttgctttgaaaacaactaattcagacatacatctcaattggtctaggtgattttaatcactataccaattgagatgggctagtcaatgataattactagtccttttcctttgagttgtgggtatctgtaaattctgctagacctttgctggaaaacttgtaaattctgctagaccctctgtaaattccgctagacctttgtgtgttttttttgtttatattcaagtggttataatttatagaataaagaaagaataaaaaaagataaaaagaatagatcccagccctgtgtataactcactactttagtcagttccgcagtattacaaaaggatgtcgcaaacgctgtttgctcctctacaaaacagaccttaaaaccctaaaggcttaagtagcaccctcgcaagctcgggcaaatcgctgaatattccttttgtctccgaccatcaggcacctgagtcgctgtctttttcgtgacattcagttcgctgcgctcacggctctggcagtgaatgggggtaaatggcactacaggcgccttttatggattcatgcaaggaaactacccataatacaagaaaagcccgtcacgggcttctcagggcgttttatggcgggtctgctatgtggtgctatctgactttttgctgttcagcagttcctgccctctgattttccagtctgaccacttcggattatcccgtgacaggtcattcagactggctaatgcacccagtaaggcagcggtatcatcaacaggcttacccgtcttactgtcaagaggacatccggtcaaataaaacgaaaggctcagtcgaaagactgggcctttcgttttgctgaggagacttagggaccctttatgacaacttgacggctacatcattcactttttcttcacaaccggcacggaactcgctcgggctggccccggtgcattttttaaatacccgcgagaaatagagttgatcgtcaaaaccaacattgcgaccgacggtggcgataggcatccgggtggtgctcaaaagcagcttcgcctggctgatacgttggtcctcgcgccagcttaagacgctaatccctaactgctggcggaaaagatgtgacagacgcgacggcgacaagcaaacatgctgtgcgacgctggcgatatcaaaattgctgtctgccaggtgatcgctgatgtactgacaagcctcgcgtacccgattatccatcggtggatggagcgactcgttaatcgcttccatgcgccgcagtaacaattgctcaagcagatttatcgccagcagctccgaatagcgcccttccccttgcccggcgttaatgatttgcccaaacaggtcgctgaaatgcggctggtgcgcttcatccgggcgaaagaaccccgtattggcaaatattgacggccagttaagccattcatgccagtaggcgcgcggacgaaagtaaacccactggtgataccattcgcgagcctccggatgacgaccgtagtgatgaatctctcctggcgggaacagcaaaatatcacccggtcggcaaacaaattctcgtccctgatttttcaccaccccctgaccgcgaatggtgagattgagaatataacctttcattcccagcggtcggtcgataaaaaaatcgagataaccgttggcctcaatcggcgttaaacccgccaccagatgggcattaaacgagtatcccggcagcaggggatcattttgcgcttcagccatacttttcatactcccaccattcagagaagaaaccaattgtccatattgcatcagacattgccgtcactgcgtcttttactggctcttctcgctaacccaaccggtaaccccgcttattaaaagcattctgtaacaaagcgggaccaaagccatgacaaaaacgcgtaacaaaagtgtctataatcacggcagaaaagtccacattgattatttgcacggcgtcacactttgctatgccatagcatttttatccataagattagcggatcctacctgacgctttttatcgcaactctctactgtttctccatacccgttttacctgcaggtgcagtagtttttgggagttagacccttggcaaataacaaatctgctaagaagcgcgctatccaagctgagaaacgtcgccagcacaatgctagccgtcgttctatgatgcgcacttacatgaagaaaactgttgctgcaatcgctgctggcgacaaagaagctgcaactgctgcattcgctgtagttacaccaatcctagaccgcatggcgactaaaggccttattcacaagaataaagcagctcgtcacaagtctcgcttctttgctgctatcaacgctctgtaatagagttttgaaatgcaaagaggacgacatggtaaccattcgtttggcacgtcacggcgcgaaaaagcgtccattctatcaaatcgttgtagctgacagccgcaactcagcaactggccgtttcatcgagaaagtaggtttctttaaccctactgctactggtcaagaagaaggcctgcgtctagacctagatcgcgtgaaccactgggtttcacaaggcgcatctctgtctgatcgcgtagcacagctagttaaaaccgctcaaaaagcggcttaattattactaaactctttaggagagaattatgtctctgaatgcagaaactaaagcagcaatcgttgctgaatatgcacgttgcgaaaatgacacaggttcaccagaagtacagatcgctctactgactgcttctatcaaccacctgcaaggtcacttccaagcacacaaaggcgatcaccacagccgtcgtggtctgctacgtatggtttcaagccgtcgtaaactgctggactacctgaaaggtaaagatctgtctcgttaccaagatctgatcaaacgtctaggcctgcgtcgttaattcgtcgcacttaattaacggcactcctcagccaagtcaaaagcctccggtcggaggcttttgactacatgcccatggcgtttacgccccgccctgccactcatcgcagtactgttgtaattcattaagcattctgccgacatggaagccatcacaaacggcatgatgaacctgaatcgccagcggcatcagcaccttgtcgccttgcgtataatatttgcccatagtgaaaacgggggcgaagaagttgtccatattggccacgtttaaatcaaaactggtgaaactcacccagggattggctgagacgaaaaacatattctcaataaaccctttagggaaataggccaggttttcaccgtaacacgccacatcttgcgaatatatgtgtagaaactgccggaaatcgtcgtggtattcactccagagcgatgaaaacgtttcagtttgctcatggaaaacggtgtaacaagggtgaacactatcccatatcaccagctcaccgtctttcattgccatacggaactccggatgagcattcatcaggcgggcaagaatgtgaataaaggccggataaaacttgtgcttatttttctttacggtctttaaaaaggccgtaatatccagctgaacggtctggttataggtacattgagcaactgactgaaatgcctcaaaatgttctttacgatgccattgggatatatcaacggtggtatatccagtgatttttttctccattttagcttccttagctcctgaaaatctcgataactcaaaaaatacgcccggtagtgatcttatttcattatggtgaaagttggaacctcttacgtgccaggccaaataggccgt

SEQ ID NO: 298 - DNA, 4713 bp, Artificial
  Synthetic
tcagatccttccgtatttagccagtatgttctctagtgtggttcgttgtttttgcgtgagccatgagaacgaaccattgagatcatgcttactttgcatgtcactcaaaaattttgcctcaaaactggtgagctgaatttttgcagttaaagcatcgtgtagtgtttttcttagtccgttacgtaggtaggaatctgatgtaatggttgttggtattttgtcaccattcatttttatctggttgttctcaagttcggttacgagatccatttgtctatctagttcaacttggaaaatcaacgtatcagtcgggcggcctcgcttatcaaccaccaatttcatattgctgtaagtgtttaaatctttacttattggtttcaaaacccattggttaagccttttaaactcatggtagttattttcaagcattaacatgaacttaaattcatcaaggctaatctctatatttgccttgtgagttttcttttgtgttagttcttttaataaccactcataaatcctcatagagtatttgttttcaaaagacttaacatgttccagattatattttatgaatttttttaactggaaaagataaggcaatatctcttcactaaaaactaattctaatttttcgcttgagaacttggcatagtttgtccactggaaaatcttaaagcctttaaccaaaggattcctgatttccacagttctcgtcatcagctctctggttgctttagctaatacaccataagcattttccctactgatgttcatcatctgagcgtattggttataagtgaacgataccgtccgttctttccttgtagggttttcaatcgtggggttgagtagtgccacacagcataaaattagcttggtttcatgctccgttaagtcatagcgactaatcgctagttcatttgctttgaaaacaactaattcagacatacatctcaattggtctaggtgattttaatcactataccaattgagatgggctagtcaatgataattactagtccttttcctttgagttgtgggtatctgtaaattctgctagacctttgctggaaaacttgtaaattctgctagaccctctgtaaattccgctagacctttgtgtgttttttttgtttatattcaagtggttataatttatagaataaagaaagaataaaaaaagataaaaagaatagatcccagccctgtgtataactcactactttagtcagttccgcagtattacaaaaggatgtcgcaaacgctgtttgctcctctacaaaacagaccttaaaaccctaaaggcttaagtagcaccctcgcaagctcgggcaaatcgctgaatattccttttgtctccgaccatcaggcacctgagtcgctgtctttttcgtgacattcagttcgctgcgctcacggctctggcagtgaatgggggtaaatggcactacaggcgccttttatggattcatgcaaggaaactacccataatacaagaaaagcccgtcacgggcttctcagggcgttttatggcgggtctgctatgtggtgctatctgactttttgctgttcagcagttcctgccctctgattttccagtctgaccacttcggattatcccgtgacaggtcattcagactggctaatgcacccagtaaggcagcggtatcatcaacaggcttacccgtcttactgtcaagaggacatccggtcaaataaaacgaaaggctcagtcgaaagactgggcctttcgttttgctgaggagacttagggaccctttatgacaacttgacggctacatcattcactttttcttcacaaccggcacggaactcgctcgggctggccccggtgcattttttaaatacccgcgagaaatagagttgatcgtcaaaaccaacattgcgaccgacggtggcgataggcatccgggtggtgctcaaaagcagcttcgcctggctgatacgttggtcctcgcgccagcttaagacgctaatccctaactgctggcggaaaagatgtgacagacgcgacggcgacaagcaaacatgctgtgcgacgctggcgatatcaaaattgctgtctgccaggtgatcgctgatgtactgacaagcctcgcgtacccgattatccatcggtggatggagcgactcgttaatcgcttccatgcgccgcagtaacaattgctcaagcagatttatcgccagcagctccgaatagcgcccttccccttgcccggcgttaatgatttgcccaaacaggtcgctgaaatgcggctggtgcgcttcatccgggcgaaagaaccccgtattggcaaatattgacggccagttaagccattcatgccagtaggcgcgcggacgaaagtaaacccactggtgataccattcgcgagcctccggatgacgaccgtagtgatgaatctctcctggcgggaacagcaaaatatcacccggtcggcaaacaaattctcgtccctgatttttcaccaccccctgaccgcgaatggtgagattgagaatataacctttcattcccagcggtcggtcgataaaaaaatcgagataaccgttggcctcaatcggcgttaaacccgccaccagatgggcattaaacgagtatcccggcagcaggggatcattttgcgcttcagccatacttttcatactcccaccattcagagaagaaaccaattgtccatattgcatcagacattgccgtcactgcgtcttttactggctcttctcgctaacccaaccggtaaccccgcttattaaaagcattctgtaacaaagcgggaccaaagccatgacaaaaacgcgtaacaaaagtgtctataatcacggcagaaaagtccacattgattatttgcacggcgtcacactttgctatgccatagcatttttatccataagattagcggatcctacctgacgctttttatcgcaactctctactgtttctccatacccgttttacctgcaggtgcagtcaaaactccaaggagttatcgtggccaacatcaagtctgcccagaagcgtgcgcttcaatccgaaaaacgtcgtctgcacaacaacagcctacgttctaaagtacgtaccagcatcaagcgtgtacttaaagaagtacaaactggtgactgggaaaaagctatggctgctttccaagctgcacagccagttattgatcgcattgctgacaagggtgttttcaacaagaactgggctgctcgtactaagagccgtctgaacgctcgtgttaaagcacttaaagcttcctaagttttaggttttaaaggaaagactcgtaatggtaaccattcgtttagcacgtggtggcgcaaaaaagcgtccgttttatcacctacacgtaactgattcacgtaatgcacgtgatggtcgttacattgagcgcctaggtttctttaaccctgtagctcaaggtaatgcagagcgtctacgtattgatactgatcgtctacagcactgggttgctcaaggcgcacagttgtcagagcgtgttgctaagttagtaaaagaagcagctaagcagcagtaattactgctagcgactgtggagttttaaaatgttaactactgaacgtaaagctgaaatcgtaaaagaattcgcgcgtgctgaaaatgataccggctcacctgaagtacaggttgccttgctaacttttgatatcaatgcactacaatctcacttcgaaactaacaaaaaagatcaccacagccgtcgtggtctaattcgtaaggttagtcagcgtcgtaagctgctagactacttgaagaaaaaagacgtaacgcgttatgcagatctaattaagcgtttaggtctacgtcgctaagttatagaacttaattaacggcactcctcagccaagtcaaaagcctccggtcggaggcttttgactacatgcccatggcgtttacgccccgccctgccactcatcgcagtactgttgtaattcattaagcattctgccgacatggaagccatcacaaacggcatgatgaacctgaatcgccagcggcatcagcaccttgtcgccttgcgtataatatttgcccatagtgaaaacgggggcgaagaagttgtccatattggccacgtttaaatcaaaactggtgaaactcacccagggattggctgagacgaaaaacatattctcaataaaccctttagggaaataggccaggttttcaccgtaacacgccacatcttgcgaatatatgtgtagaaactgccggaaatcgtcgtggtattcactccagagcgatgaaaacgtttcagtttgctcatggaaaacggtgtaacaagggtgaacactatcccatatcaccagctcaccgtctttcattgccatacggaactccggatgagcattcatcaggcgggcaagaatgtgaataaaggccggataaaacttgtgcttatttttctttacggtctttaaaaaggccgtaatatccagctgaacggtctggttataggtacattgagcaactgactgaaatgcctcaaaatgttctttacgatgccattgggatatatcaacggtggtatatccagtgatttttttctccattttagcttccttagctcctgaaaatctcgataactcaaaaaatacgcccggtagtgatcttatttcattatggtgaaagttggaacctcttacgtgccaagccaaataggccgt

SEQ ID NO: 299 - DNA, 4722 bp, Artificial
  Synthetic
tcagatccttccgtatttagccagtatgttctctagtgtggttcgttgtttttgcgtgagccatgagaacgaaccattgagatcatgcttactttgcatgtcactcaaaaattttgcctcaaaactggtgagctgaatttttgcagttaaagcatcgtgtagtgtttttcttagtccgttacgtaggtaggaatctgatgtaatggttgttggtattttgtcaccattcatttttatctggttgttctcaagttcggttacgagatccatttgtctatctagttcaacttggaaaatcaacgtatcagtcgggcggcctcgcttatcaaccaccaatttcatattgctgtaagtgtttaaatctttacttattggtttcaaaacccattggttaagccttttaaactcatggtagttattttcaagcattaacatgaacttaaattcatcaaggctaatctctatatttgccttgtgagttttcttttgtgttagttcttttaataaccactcataaatcctcatagagtatttgttttcaaaagacttaacatgttccagattatattttatgaatttttttaactggaaaagataaggcaatatctcttcactaaaaactaattctaatttttcgcttgagaacttggcatagtttgtccactggaaaatcttaaagcctttaaccaaaggattcctgatttccacagttctcgtcatcagctctctggttgctttagctaatacaccataagcattttccctactgatgttcatcatctgagcgtattggttataagtgaacgataccgtccgttctttccttgtagggttttcaatcgtggggttgagtagtgccacacagcataaaattagcttggtttcatgctccgttaagtcatagcgactaatcgctagttcatttgctttgaaaacaactaattcagacatacatctcaattggtctaggtgattttaatcactataccaattgagatgggctagtcaatgataattactagtccttttcctttgagttgtgggtatctgtaaattctgctagacctttgctggaaaacttgtaaattctgctagaccctctgtaaattccgctagacctttgtgtgttttttttgtttatattcaagtggttataatttatagaataaagaaagaataaaaaaagataaaaagaatagatcccagccctgtgtataactcactactttagtcagttccgcagtattacaaaaggatgtcgcaaacgctgtttgctcctctacaaaacagaccttaaaaccctaaaggcttaagtagcaccctcgcaagctcgggcaaatcgctgaatattccttttgtctccgaccatcaggcacctgagtcgctgtctttttcgtgacattcagttcgctgcgctcacggctctggcagtgaatgggggtaaatggcactacaggcgccttttatggattcatgcaaggaaactacccataatacaagaaaagcccgtcacgggcttctcagggcgttttatggcgggtctgctatgtggtgctatctgactttttgctgttcagcagttcctgccctctgattttccagtctgaccacttcggattatcccgtgacaggtcattcagactggctaatgcacccagtaaggcagcggtatcatcaacaggcttacccgtcttactgtcaagaggacatccggtcaaataaaacgaaaggctcagtcgaaagactgggcctttcgttttgctgaggagacttagggaccctttatgacaacttgacggctacatcattcactttttcttcacaaccggcacggaactcgctcgggctggccccggtgcattttttaaatacccgcgagaaatagagttgatcgtcaaaaccaacattgcgaccgacggtggcgataggcatccgggtggtgctcaaaagcagcttcgcctggctgatacgttggtcctcgcgccagcttaagacgctaatccctaactgctggcggaaaagatgtgacagacgcgacggcgacaagcaaacatgctgtgcgacgctggcgatatcaaaattgctgtctgccaggtgatcgctgatgtactgacaagcctcgcgtacccgattatccatcggtggatggagcgactcgttaatcgcttccatgcgccgcagtaacaattgctcaagcagatttatcgccagcagctccgaatagcgcccttccccttgcccggcgttaatgatttgcccaaacaggtcgctgaaatgcggctggtgcgcttcatccgggcgaaagaaccccgtattggcaaatattgacggccagttaagccattcatgccagtaggcgcgcggacgaaagtaaacccactggtgataccattcgcgagcctccggatgacgaccgtagtgatgaatctctcctggcgggaacagcaaaatatcacccggtcggcaaacaaattctcgtccctgatttttcaccaccccctgaccgcgaatggtgagattgagaatataacctttcattcccagcggtcggtcgataaaaaaatcgagataaccgttggcctcaatcggcgttaaacccgccaccagatgggcattaaacgagtatcccggcagcaggggatcattttgcgcttcagccatacttttcatactcccaccattcagagaagaaaccaattgtccatattgcatcagacattgccgtcactgcgtcttttactggctcttctcgctaacccaaccggtaaccccgcttattaaaagcattctgtaacaaagcgggaccaaagccatgacaaaaacgcgtaacaaaagtgtctataatcacggcagaaaagtccacattgattatttgcacggcgtcacactttgctatgccatagcatttttatccataagattagcggatcctacctgacgctttttatcgcaactctctactgtttctccatacccgttttacctgcaggtgcagtaaacttaggctttattaaaaatggctaataccgcacaagcacgcaagcgcgcccgccaagcagtggctcgcaacaaacacaacgccagcatccgttccatgctgcgtaccgctatcaagcgcgttcgccaggctatcgaagccggtgacaaaactgctgctaacgaagttttccgcaaagcgaccagcatcattgatcgcgttgccgacaagaacatcattcacaagaacaaggctgcccgccacaagagccgcctgtctgctgctatcaaggccctggcctgattgctgaaacacaataaagggattatcaatggtggtaattcgcttggcccgtggtggctccaaaaagcgtcctttttacaacgtagtagccgccgaggcgagccaacgccgtgatggtcgcttcatcgaacgtctgggtttctacaaccccgtcgctggcgaaggtcatgaaaacctgcgtctgcaaatggaccgcgttaagcacttcaccgacaacggtgctcaggtttcgcctgctgtggctcgcctgttgaaagaatactcggctaaggttgcttcggctgcctaagttgattcagtcttagaggctaaataaaatggcagttgcagatatcaaaaaagtcgatatcgtttccgagtttcagcgtaaacaaggcgatacaggctccccagaagtgcaagtggctttgctgaccgctcgcatcaacgaattgaccggccacttcaaggctcacaacaaggatcaccactcccgtcgtggtctgttgcgcatggttagccgtcgtcgcaaattgctggattacctgaaaggtcgtaatccagacgcttaccgtgctttgatcgaaaaactcggtctgcgtaagtgataccggggacttaattaacggcactcctcagccaagtcaaaagcctccggtcggaggcttttgactacatgcccatggcgtttacgccccgccctgccactcatcgcagtactgttgtaattcattaagcattctgccgacatggaagccatcacaaacggcatgatgaacctgaatcgccagcggcatcagcaccttgtcgccttgcgtataatatttgcccatagtgaaaacgggggcgaagaagttgtccatattggccacgtttaaatcaaaactggtgaaactcacccagggattggctgagacgaaaaacatattctcaataaaccctttagggaaataggccaggttttcaccgtaacacgccacatcttgcgaatatatgtgtagaaactgccggaaatcgtcgtggtattcactccagagcgatgaaaacgtttcagtttgctcatggaaaacggtgtaacaagggtgaacactatcccatatcaccagctcaccgtctttcattgccatacggaactccggatgagcattcatcaggcgggcaagaatgtgaataaaggccggataaaacttgtgcttatttttctttacggtctttaaaaaggccgtaatatccagctgaacggtctggttataggtacattgagcaactgactgaaatgcctcaaaatgttctttacgatgccattgggatatatcaacggtggtatatccagtgatttttttctccattttagcttccttagctcctgaaaatctcgataactcaaaaaatacgcccggtagtgatcttatttcattatggtgaaagttggaacctcttacgtgccaagccaaataggccgt

SEQ ID NO: 300 - DNA, 4725 bp, Artificial
  Synthetic
tcagatccttccgtatttagccagtatgttctctagtgtggttcgttgtttttgcgtgagccatgagaacgaaccattgagatcatgcttactttgcatgtcactcaaaaattttgcctcaaaactggtgagctgaatttttgcagttaaagcatcgtgtagtgtttttcttagtccgttacgtaggtaggaatctgatgtaatggttgttggtattttgtcaccattcatttttatctggttgttctcaagttcggttacgagatccatttgtctatctagttcaacttggaaaatcaacgtatcagtcgggcggcctcgcttatcaaccaccaatttcatattgctgtaagtgtttaaatctttacttattggtttcaaaacccattggttaagccttttaaactcatggtagttattttcaagcattaacatgaacttaaattcatcaaggctaatctctatatttgccttgtgagttttcttttgtgttagttcttttaataaccactcataaatcctcatagagtatttgttttcaaaagacttaacatgttccagattatattttatgaatttttttaactggaaaagataaggcaatatctcttcactaaaaactaattctaatttttcgcttgagaacttggcatagtttgtccactggaaaatcttaaagcctttaaccaaaggattcctgatttccacagttctcgtcatcagctctctggttgctttagctaatacaccataagcattttccctactgatgttcatcatctgagcgtattggttataagtgaacgataccgtccgttctttccttgtagggttttcaatcgtggggttgagtagtgccacacagcataaaattagcttggtttcatgctccgttaagtcatagcgactaatcgctagttcatttgctttgaaaacaactaattcagacatacatctcaattggtctaggtgattttaatcactataccaattgagatgggctagtcaatgataattactagtccttttcctttgagttgtgggtatctgtaaattctgctagacctttgctggaaaacttgtaaattctgctagaccctctgtaaattccgctagacctttgtgtgttttttttgtttatattcaagtggttataatttatagaataaagaaagaataaaaaaagataaaaagaatagatcccagccctgtgtataactcactactttagtcagttccgcagtattacaaaaggatgtcgcaaacgctgtttgctcctctacaaaacagaccttaaaaccctaaaggcttaagtagcaccctcgcaagctcgggcaaatcgctgaatattccttttgtctccgaccatcaggcacctgagtcgctgtctttttcgtgacattcagttcgctgcgctcacggctctggcagtgaatgggggtaaatggcactacaggcgccttttatggattcatgcaaggaaactacccataatacaagaaaagcccgtcacgggcttctcagggcgttttatggcgggtctgctatgtggtgctatctgactttttgctgttcagcagttcctgccctctgattttccagtctgaccacttcggattatcccgtgacaggtcattcagactggctaatgcacccagtaaggcagcggtatcatcaacaggcttacccgtcttactgtcaagaggacatccggtcaaataaaacgaaaggctcagtcgaaagactgggcctttcgttttgctgaggagacttagggaccctttatgacaacttgacggctacatcattcactttttcttcacaaccggcacggaactcgctcgggctggccccggtgcattttttaaatacccgcgagaaatagagttgatcgtcaaaaccaacattgcgaccgacggtggcgataggcatccgggtggtgctcaaaagcagcttcgcctggctgatacgttggtcctcgcgccagcttaagacgctaatccctaactgctggcggaaaagatgtgacagacgcgacggcgacaagcaaacatgctgtgcgacgctggcgatatcaaaattgctgtctgccaggtgatcgctgatgtactgacaagcctcgcgtacccgattatccatcggtggatggagcgactcgttaatcgcttccatgcgccgcagtaacaattgctcaagcagatttatcgccagcagctccgaatagcgcccttccccttgcccggcgttaatgatttgcccaaacaggtcgctgaaatgcggctggtgcgcttcatccgggcgaaagaaccccgtattggcaaatattgacggccagttaagccattcatgccagtaggcgcgcggacgaaagtaaacccactggtgataccattcgcgagcctccggatgacgaccgtagtgatgaatctctcctggcgggaacagcaaaatatcacccggtcggcaaacaaattctcgtccctgatttttcaccaccccctgaccgcgaatggtgagattgagaatataacctttcattcccagcggtcggtcgataaaaaaatcgagataaccgttggcctcaatcggcgttaaacccgccaccagatgggcattaaacgagtatcccggcagcaggggatcattttgcgcttcagccatacttttcatactcccaccattcagagaagaaaccaattgtccatattgcatcagacattgccgtcactgcgtcttttactggctcttctcgctaacccaaccggtaaccccgcttattaaaagcattctgtaacaaagcgggaccaaagccatgacaaaaacgcgtaacaaaagtgtctataatcacggcagaaaagtccacattgattatttgcacggcgtcacactttgctatgccatagcatttttatccataagattagcggatcctacctgacgctttttatcgcaactctctactgtttctccatacccgttttacctgcaggtgcagtggacaggataaggaaccgtcatggctaactccgcacaagcacgcaagcgcgcccgccaggccgcgaaggcaaactcgcacaactcggcgctgcgctcgaaattccgtaccgcgatcaagtcggttcgcaaggctgttgaagccggcgaccaggcaaaggctgccgagctgttcaaggctgccgtgaagacgatcgacacgatcgccgacaagaagatcgttcacaagaacaaggccgctcgcagcaagagccgcctggccgcagccgtcaagggcctgcaggcagcagcgtaactccggtggttttcccgaaggacatcatatggttatcatccgtctggctcgtggcggctcgaagaagcgcccgttctacaacatcgttgctaccgattcgcgcaaccgtcgtgacggccgcttcatcgagcgcgtcggcttctacaacccggtcgccacgaagggcgaatcgctgcgtatcgctcaggatcgcctgacgtactggcaaggcgttggcgcgcaactgtcgccgaccgtccagcgtctcgtgaaggaagcgcaaaaggcgcaaccggctgcctaacatggcactcagttagaaaggaaatcacatgtctgttgcagatatcaagaagtcggaagtcgttgctcagttcgcccgcggtaccaacgacacggggtcgcccgaagtccaggtcgcactgctgaccgcacgtatcgtcgaactgacgggtcacttcaagacccacgcgaaggatcaccacagccgccgcggcctgctgcgcatggtgagccgccgccgcaagctgctcgactacctcaagggcaaggatgccgaccgttaccgcgcactgatcgagaagctgggtctgcgtaagtaatcgaggcgacttaattaacggcactcctcagccaagtcaaaagcctccggtcggaggcttttgactacatgcccatggcgtttacgccccgccctgccactcatcgcagtactgttgtaattcattaagcattctgccgacatggaagccatcacaaacggcatgatgaacctgaatcgccagcggcatcagcaccttgtcgccttgcgtataatatttgcccatagtgaaaacgggggcgaagaagttgtccatattggccacgtttaaatcaaaactggtgaaactcacccagggattggctgagacgaaaaacatattctcaataaaccctttagggaaataggccaggttttcaccgtaacacgccacatcttgcgaatatatgtgtagaaactgccggaaatcgtcgtggtattcactccagagcgatgaaaacgtttcagtttgctcatggaaaacggtgtaacaagggtgaacactatcccatatcaccagctcaccgtctttcattgccatacggaactccggatgagcattcatcaggcgggcaagaatgtgaataaaggccggataaaacttgtgcttatttttctttacggtctttaaaaaggccgtaatatccagctgaacggtctggttataggtacattgagcaactgactgaaatgcctcaaaatgttctttacgatgccattgggatatatcaacggtggtatatccagtgatttttttctccattttagcttccttagctcctgaaaatctcgataactcaaaaaatacgcccggtagtgatcttatttcattatggtgaaagttggaacctcttacgtgccaggccaaataggccgt

SEQ ID NO: 301 - DNA, 4707 bp, Artificial
  Synthetic
tcagatccttccgtatttagccagtatgttctctagtgtggttcgttgtttttgcgtgagccatgagaacgaaccattgagatcatgcttactttgcatgtcactcaaaaattttgcctcaaaactggtgagctgaatttttgcagttaaagcatcgtgtagtgtttttcttagtccgttacgtaggtaggaatctgatgtaatggttgttggtattttgtcaccattcatttttatctggttgttctcaagttcggttacgagatccatttgtctatctagttcaacttggaaaatcaacgtatcagtcgggcggcctcgcttatcaaccaccaatttcatattgctgtaagtgtttaaatctttacttattggtttcaaaacccattggttaagccttttaaactcatggtagttattttcaagcattaacatgaacttaaattcatcaaggctaatctctatatttgccttgtgagttttcttttgtgttagttcttttaataaccactcataaatcctcatagagtatttgttttcaaaagacttaacatgttccagattatattttatgaatttttttaactggaaaagataaggcaatatctcttcactaaaaactaattctaatttttcgcttgagaacttggcatagtttgtccactggaaaatcttaaagcctttaaccaaaggattcctgatttccacagttctcgtcatcagctctctggttgctttagctaatacaccataagcattttccctactgatgttcatcatctgagcgtattggttataagtgaacgataccgtccgttctttccttgtagggttttcaatcgtggggttgagtagtgccacacagcataaaattagcttggtttcatgctccgttaagtcatagcgactaatcgctagttcatttgctttgaaaacaactaattcagacatacatctcaattggtctaggtgattttaatcactataccaattgagatgggctagtcaatgataattactagtccttttcctttgagttgtgggtatctgtaaattctgctagacctttgctggaaaacttgtaaattctgctagaccctctgtaaattccgctagacctttgtgtgttttttttgtttatattcaagtggttataatttatagaataaagaaagaataaaaaaagataaaaagaatagatcccagccctgtgtataactcactactttagtcagttccgcagtattacaaaaggatgtcgcaaacgctgtttgctcctctacaaaacagaccttaaaaccctaaaggcttaagtagcaccctcgcaagctcgggcaaatcgctgaatattccttttgtctccgaccatcaggcacctgagtcgctgtctttttcgtgacattcagttcgctgcgctcacggctctggcagtgaatgggggtaaatggcactacaggcgccttttatggattcatgcaaggaaactacccataatacaagaaaagcccgtcacgggcttctcagggcgttttatggcgggtctgctatgtggtgctatctgactttttgctgttcagcagttcctgccctctgattttccagtctgaccacttcggattatcccgtgacaggtcattcagactggctaatgcacccagtaaggcagcggtatcatcaacaggcttacccgtcttactgtcaagaggacatccggtcaaataaaacgaaaggctcagtcgaaagactgggcctttcgttttgctgaggagacttagggaccctttatgacaacttgacggctacatcattcactttttcttcacaaccggcacggaactcgctcgggctggccccggtgcattttttaaatacccgcgagaaatagagttgatcgtcaaaaccaacattgcgaccgacggtggcgataggcatccgggtggtgctcaaaagcagcttcgcctggctgatacgttggtcctcgcgccagcttaagacgctaatccctaactgctggcggaaaagatgtgacagacgcgacggcgacaagcaaacatgctgtgcgacgctggcgatatcaaaattgctgtctgccaggtgatcgctgatgtactgacaagcctcgcgtacccgattatccatcggtggatggagcgactcgttaatcgcttccatgcgccgcagtaacaattgctcaagcagatttatcgccagcagctccgaatagcgcccttccccttgcccggcgttaatgatttgcccaaacaggtcgctgaaatgcggctggtgcgcttcatccgggcgaaagaaccccgtattggcaaatattgacggccagttaagccattcatgccagtaggcgcgcggacgaaagtaaacccactggtgataccattcgcgagcctccggatgacgaccgtagtgatgaatctctcctggcgggaacagcaaaatatcacccggtcggcaaacaaattctcgtccctgatttttcaccaccccctgaccgcgaatggtgagattgagaatataacctttcattcccagcggtcggtcgataaaaaaatcgagataaccgttggcctcaatcggcgttaaacccgccaccagatgggcattaaacgagtatcccggcagcaggggatcattttgcgcttcagccatacttttcatactcccaccattcagagaagaaaccaattgtccatattgcatcagacattgccgtcactgcgtcttttactggctcttctcgctaacccaaccggtaaccccgcttattaaaagcattctgtaacaaagcgggaccaaagccatgacaaaaacgcgtaacaaaagtgtctataatcacggcagaaaagtccacattgattatttgcacggcgtcacactttgctatgccatagcatttttatccataagattagcggatcctacctgacgctttttatcgcaactctctactgtttctccatacccgttttacctgcaggtgcagtttctttcaggagattccaatatggcaaacagcgcacaagcacgcaaacgtgcccgccagtccgtcaaacaacgcgcccacaacgctagcctgcgtaccgcattccgcaccgcagtgaaaaaagtattgaaagcagtcgaagcaggcgataaagctgccgcacgagcggtttaccaagagtccgtcaaagtcatcgaccgcatcgccgacaaaggcgtgttccacaaaaacaaagcggctcgccacaaaagccgcctgtctgcaaaagtaaaagcactggcttgatttttgcattttctcaaaaggactcaaaatggtagttatccgtttggcacgcggcggctcgaaacaccgccccttctacaacgtcatcgttactgactcacgcagccgccgcgacggccgcttcatcgaacgcgtaggcttctacaaccccgtagccaacgaaaaacaagagcgcgtccgcctcaatgcagaccgcctgaaccactggattgcacaaggcgcgcaagtcagcgactccgttgcaaaactgattaaagaacaaaaagccgtctaatccgcgtttttttcggagtttttccattatggcactgaccgtagaacaaaaagcacaaatcgttaaagatttccaacgtaaagaaggcgacaccggctcttctgaagtacaagttgccctgttgactttccgcatcaacgatctgaccccccacttcaaagccaaccccaaagaccaccacagccgtcgcggcctgttgaaaatggtcagccaacgccgtcgcctgttggtctatttgcgccgtacccagcccgatacgtatcgcgcgttgattacccgcttgggtctgcgtaaataattgcgcttacttaattaacggcactcctcagccaagtcaaaagcctccggtcggaggcttttgactacatgcccatggcgtttacgccccgccctgccactcatcgcagtactgttgtaattcattaagcattctgccgacatggaagccatcacaaacggcatgatgaacctgaatcgccagcggcatcagcaccttgtcgccttgcgtataatatttgcccatagtgaaaacgggggcgaagaagttgtccatattggccacgtttaaatcaaaactggtgaaactcacccagggattggctgagacgaaaaacatattctcaataaaccctttagggaaataggccaggttttcaccgtaacacgccacatcttgcgaatatatgtgtagaaactgccggaaatcgtcgtggtattcactccagagcgatgaaaacgtttcagtttgctcatggaaaacggtgtaacaagggtgaacactatcccatatcaccagctcaccgtctttcattgccatacggaactccggatgagcattcatcaggcgggcaagaatgtgaataaaggccggataaaacttgtgcttatttttctttacggtctttaaaaaggccgtaatatccagctgaacggtctggttataggtacattgagcaactgactgaaatgcctcaaaatgttctttacgatgccattgggatatatcaacggtggtatatccagtgatttttttctccattttagcttccttagctcctgaaaatctcgataactcaaaaaatacgcccggtagtgatcttatttcattatggtgaaagttggaacctcttacgtgccaagccaaataggccgt

SEQ ID NO: 302 - DNA, 4725 bp, Artificial
  Synthetic
tcagatccttccgtatttagccagtatgttctctagtgtggttcgttgtttttgcgtgagccatgagaacgaaccattgagatcatgcttactttgcatgtcactcaaaaattttgcctcaaaactggtgagctgaatttttgcagttaaagcatcgtgtagtgtttttcttagtccgttacgtaggtaggaatctgatgtaatggttgttggtattttgtcaccattcatttttatctggttgttctcaagttcggttacgagatccatttgtctatctagttcaacttggaaaatcaacgtatcagtcgggcggcctcgcttatcaaccaccaatttcatattgctgtaagtgtttaaatctttacttattggtttcaaaacccattggttaagccttttaaactcatggtagttattttcaagcattaacatgaacttaaattcatcaaggctaatctctatatttgccttgtgagttttcttttgtgttagttcttttaataaccactcataaatcctcatagagtatttgttttcaaaagacttaacatgttccagattatattttatgaatttttttaactggaaaagataaggcaatatctcttcactaaaaactaattctaatttttcgcttgagaacttggcatagtttgtccactggaaaatcttaaagcctttaaccaaaggattcctgatttccacagttctcgtcatcagctctctggttgctttagctaatacaccataagcattttccctactgatgttcatcatctgagcgtattggttataagtgaacgataccgtccgttctttccttgtagggttttcaatcgtggggttgagtagtgccacacagcataaaattagcttggtttcatgctccgttaagtcatagcgactaatcgctagttcatttgctttgaaaacaactaattcagacatacatctcaattggtctaggtgattttaatcactataccaattgagatgggctagtcaatgataattactagtccttttcctttgagttgtgggtatctgtaaattctgctagacctttgctggaaaacttgtaaattctgctagaccctctgtaaattccgctagacctttgtgtgttttttttgtttatattcaagtggttataatttatagaataaagaaagaataaaaaaagataaaaagaatagatcccagccctgtgtataactcactactttagtcagttccgcagtattacaaaaggatgtcgcaaacgctgtttgctcctctacaaaacagaccttaaaaccctaaaggcttaagtagcaccctcgcaagctcgggcaaatcgctgaatattccttttgtctccgaccatcaggcacctgagtcgctgtctttttcgtgacattcagttcgctgcgctcacggctctggcagtgaatgggggtaaatggcactacaggcgccttttatggattcatgcaaggaaactacccataatacaagaaaagcccgtcacgggcttctcagggcgttttatggcgggtctgctatgtggtgctatctgactttttgctgttcagcagttcctgccctctgattttccagtctgaccacttcggattatcccgtgacaggtcattcagactggctaatgcacccagtaaggcagcggtatcatcaacaggcttacccgtcttactgtcaagaggacatccggtcaaataaaacgaaaggctcagtcgaaagactgggcctttcgttttgctgaggagacttagggaccctttatgacaacttgacggctacatcattcactttttcttcacaaccggcacggaactcgctcgggctggccccggtgcattttttaaatacccgcgagaaatagagttgatcgtcaaaaccaacattgcgaccgacggtggcgataggcatccgggtggtgctcaaaagcagcttcgcctggctgatacgttggtcctcgcgccagcttaagacgctaatccctaactgctggcggaaaagatgtgacagacgcgacggcgacaagcaaacatgctgtgcgacgctggcgatatcaaaattgctgtctgccaggtgatcgctgatgtactgacaagcctcgcgtacccgattatccatcggtggatggagcgactcgttaatcgcttccatgcgccgcagtaacaattgctcaagcagatttatcgccagcagctccgaatagcgcccttccccttgcccggcgttaatgatttgcccaaacaggtcgctgaaatgcggctggtgcgcttcatccgggcgaaagaaccccgtattggcaaatattgacggccagttaagccattcatgccagtaggcgcgcggacgaaagtaaacccactggtgataccattcgcgagcctccggatgacgaccgtagtgatgaatctctcctggcgggaacagcaaaatatcacccggtcggcaaacaaattctcgtccctgatttttcaccaccccctgaccgcgaatggtgagattgagaatataacctttcattcccagcggtcggtcgataaaaaaatcgagataaccgttggcctcaatcggcgttaaacccgccaccagatgggcattaaacgagtatcccggcagcaggggatcattttgcgcttcagccatacttttcatactcccaccattcagagaagaaaccaattgtccatattgcatcagacattgccgtcactgcgtcttttactggctcttctcgctaacccaaccggtaaccccgcttattaaaagcattctgtaacaaagcgggaccaaagccatgacaaaaacgcgtaacaaaagtgtctataatcacggcagaaaagtccacattgattatttgcacggcgtcacactttgctatgccatagcatttttatccataagattagcggatcctacctgacgctttttatcgcaactctctactgtttctccatacccgttttacctgcaggtgcagtctcataaacaggcgcagccattgggctgcaaggagatagacaacgtggcaaatcatgtatccgcactgaaacgtgcccgccaggatcaaaagaaacgtattcagaatcgtgcccagaagtcggctatgcgtactgccgtcaagcaggtgctggtggctgtagaggcaggagacaagcaggctgcatccgatgcgctgaagcaggcgacgtccttgcttgaccgtgccggccgcaagaaccagatgcatccgcgtcaggcttcccgccgtgtttcccgcctgaatgcccatgttaaggctattggctaatatacctaatttttcggaggtaacaaatatggcaactgtgattcgcctgagccgtggtggacgcaagaagcgtcctttttattctgtagtcgtcatggacggccgcaagcgtcgtgatggcgcatttatcgagaagctcggttattttgatccgtgcaaagatcctgaagtgatccagctggaccttgagcgtgtgaaagcatggaccgatcagggtgcccaggtatccgatcgcgtggctagcctgatcgccaaggcatccgcgtaatcagcttgaaataagaggaagaacgttcatgtctttggcgctggaagaaaaaaacacaatcattgaaaattttcgtcgtaatgaaggcgataccggttcaccggaagtgcaggttgccctgttgacggagcgtatcaatcagctcggcggtcacttcaaggacaaccacaaggaccatcactcacgccgcggcctgcttaaaatggtcggtcagcgccgtaacctgcttaaatatttgaagaaagaagattttagtcgttatcgtaccctgatcgaaagtctgggactgcgtcgctaaacagtttcacttaattaacggcactcctcagccaagtcaaaagcctccggtcggaggcttttgactacatgcccatggcgtttacgctccgccctgccactcatcgcagtactgttgtaattcattaagcattctgccgacatggaagccatcacaaacggcatgatgaacctgaatcgccagcggcatcagcaccttgtcgccttgcgtataatatttgcccatagtgaaaacgggggcgaagaagttgtccatattggccacgtttaaatcaaaactggtgaaactcacccagggattggctgagacgaaaaacatattctcaataaaccctttagggaaataggccaggttttcaccgtaacacgccacatcttgcgaatatatgtgtagaaactgccggaaatcgtcgtggtattcactccagagcgatgaaaacgtttcagtttgctcatggaaaacggtgtaacaagggtgaacactatcccatatcaccagctcaccgtctttcattgccatacggaactccggatgagcattcatcaggcgggcaagaatgtgaataaaggccggataaaacttgtgcttatttttctttacggtctttaaaaaggccgtaatatccagctgaacggtctggttataggtacattgagcaactgactgaaatgcctcaaaatgttctttacgatgccattgggatatatcaacggtggtatatccagtgatttttttctccattttagcttccttagctcctgaaaatctcgataactcaaaaaatacgcccggtagtgatcttatttcattatggtgaaagttggaacctcttacgtgccaagccaaataggccgt

SEQ ID NO: 303 - DNA, 5469 bp, Artificial
  Synthetic
ctagcgtttgcaatgcaccaggtcatcattgacccaggcgtgttccaccaggccgctgcctcgcaactcttcgcaggcttcgccgacctgctcgcgccacttcttcacgcgggtggaatccgatccgcacatgaggcggaaggtttccagcttgagcgggtacggctcccggtgcgagctgaaatagtcgaacatccgtcgggccgtcggcgacagcttgcggtacttctcccatatgaatttcgtgtagtggtcgccagcaaacagcacgacgatttcctcgtcgatcaggacctggcaacgggacgttttcttgccacggtccaggacgcggaagcggtgcagcagcgacaccgattccaggtgcccaacgcggtcggacgtgaagcccatcgccgtcgcctgtaggcgcgacaggcattcctcggccttcgtgtaataccggccattgatcgaccagcccaggtcctggcaaagctcgtagaacgtgaaggtgatcggctcgccgataggggtgcgcttcgcgtactccaacacctgctgccacaccagttcgtcatcgtcggcccgcagctcgacgccggtgtaggtgatcttcacgtccttgttgacgtggaaaatgaccttgttttgcagcgcctcgcgcgggattttcttgttgcgcgtggtgaacagggcagagcgggccgtgtcgtttggcatcgctcgcatcgtgtccggccacggcgcaatatcgaacaaggaaagctgcatttccttgatctgctgcttcgtgtgtttcagcaacgcggcctgcttggcctcgctgacctgttttgccaggtcctcgccggcggtttttcgcttcttggtcgtcatagttcctcgcgtgtcgatggtcatcgacttcgccaaacctgccgcctcctgttcgagacgacgcgaacgctccacggcggccgatggcgcgggcagggcagggggagccagttgcacgctgtcgcgctcgatcttggccgtagcttgctggaccatcgagccgacggactggaaggtttcgcggggcgcacgcatgacggtgcggcttgcgatggtttcggcatcctcggcggaaaaccccgcgtcgatcagttcttgcctgtatgccttccggtcaaacgtccgattcattcaccctccttatatcgtatggggctgctagcataatacctagggctgagctagccgtaaagtgaaagaagagaaacctccatttttggggtgaggccgttcgcggccgaggggcgcagcccctggggggatgggaggcccgcgttagcgggccgggagggttcgagaagggggggcaccccccttcggcgtgcgcggtcacgcgcacagggcgcagccctggttaaaaacaaggtttataaatattggtttaaaagcaggttaaaagacaggttagcggtggccgaaaaacgggcggaaacccttgcaaatgctggattttctgcctgtggacagcccctcaaatgtcaataggtgcgcccctcatctgtcagcactctgcccctcaagtgtcaaggatcgcgcccctcatctgtcagtagtcgcgcccctcaagtgtcaataccgcagggcacttatccccaggcttgtccacatcatctgtgggaaactcgcgtaaaatcaggcgttttcgccgatttgcgaggctggccagctccacgtcgccggccgaaatcgagcctgcccctcatctgtcaacgccgcgccgggtgagtcggcccctcaagtgtcaacgtccgcccctcatctgtcagtaagaggacatccggtcaaataaaacgaaaggctcagtcgaaagactgggcctttcgttttgctgaggagacttagggaccctttaatctttctgcgaattgagatgacgccactggctgggcgtcatcccggtttcccgggtaaacaccaccgaaaaatagttactatcttcaaagccacattcggtcgaaatatcactgattaacaggcggctatgctggagaagatattgcgcatgacacactctgacctgtcgcagatattgattgatggtcattccagtctgctggcgaaattgctgacgcaaaacgcgctcactgcacgatgcctcatcacaaaatttatccagcgcaaagggacttttcaggctagccgccagccgggtaatcagcttatccagcaacgtttcgctggatgttggcggcaacgaatcactggtgtaacgatggcgattcagcaacatcaccaactgcccgaacagcaactcagccatttcgttagcaaacggcacatgctgactactttcatgctcaagctgaccgataacctgccgcgcctgcgccatccccatgctacctaagcgccagtgtggttgccctgcgctggcgttaaatcccggaatcgccccctgccagtcaagattcagcttcagacgctccgggcaataaataatattctgcaaaaccagatcgttaacggaagcgtaggagtgtttatcgtcagcatgaatgtaaaagagatcgccacgggtaatgcgataagggcgatcgttgagtacatgcaggccattaccgcgccagacaatcaccagctcacaaaaatcatgtgtatgttcagcaaagacatcttgcggataacggtcagccacagcgactgcctgctggtcgctggcaaaaaaatcatctttgagaagttttaactgatgcgccaccgtggctacctcggccagagaacgaagttgattattcgcaatatggcgtacaaatacgttgagaagattcgcgttattgcagaaagccatcccgtccctggcgaatatcacgcggtgaccagttaaactctcggcgaaaaagcgtcgaaaagtggttactgtcgctgaatccacagcgataggcgatgtcagtaacgctggcctcgctgtggcgtagcagatgtcgggctttcatcagtcgcaggcggttcaggtatcgctgaggcgtcagtcccgtttgctgcttaagctgccgatgtagcgtacgcagtgaaagagaaaattgatccgccacggcatcccaattcacctcatcggcaaaatggtcctccagccaggccagaagcaagttgagacgtgatgcgctgttttccaggttctcctgcaaactgcttttacgcagcaagagcagtaattgcataaacaagatctcgcgactggcggtcgagggtaaatcattttccccttcctgctgttccatctgtgcaaccagctgtcgcacctgctgcaatacgctgtggttaacgcgccagtgagacggatactgcccatccagctcttgtggcagcaactgattcagcccggcgagaaactgaaatcgatccggcgagcgatacagcacattggtcagacacagattatcggtatgttcatacagatgccgatcatgatcgcgtacgaaacagaccgtgccaccggtgatggtatagggctgcccattaaacacatgaatacccgtgccatgttcgacaatcacaatttcatgaaaatcatgatgatgttcaggaaaatccgcctgcgggagccggggttctatcgccacggacgcgttaccagacggaaaaaaatccacactatgtaatacggtcatactggcctcctgatgtcgtcaacacggcgaaatagtaatcacgaggtcaggttcttaccttaaattttcgacggaaaaccacgtaaaaaacgtcgatttttcaagatacagcgtgaattttcaggaaatgcggtgagcatcacatcaccacaattcagcaaattgtgaacatcatcacgttcatctttccctggttgccaatggcccattttcctgtcagtaacgagaaggtcgcgaattcaggcgctttttagactggtcgtaatgaaattacctgcaggtgcagtggacaggataaggaaccgtcatggctaactccgcacaagcacgcaagcgcgcccgccaggccgcgaaggcaaactcgcacaactcggcgctgcgctcgaaattccgtaccgcgatcaagtcggttcgcaaggctgttgaagccggcgaccaggcaaaggctgccgagctgttcaaggctgccgtgaagacgatcgacacgatcgccgacaagaagatcgttcacaagaacaaggccgctcgcagcaagagccgcctggccgcagccgtcaagggcctgcaggcagcagcgtaactccggtggttttcccgaaggacatcatatggttatcatccgtctggctcgtggcggctcgaagaagcgcccgttctacaacatcgttgctaccgattcgcgcaaccgtcgtgacggccgcttcatcgagcgcgtcggcttctacaacccggtcgccacgaagggcgaatcgctgcgtatcgctcaggatcgcctgacgtactggcaaggcgttggcgcgcaactgtcgccgaccgtccagcgtctcgtgaaggaagcgcaaaaggcgcaaccggctgcctaacatggcacacttaattaacggcactcctcagcaaatataatgaccctcttgataacccaagagggcattttttaatgcccatggcgtttatttgccgactaccttggtgatctcgcctttcacgtagtggacaaattcttccaactgatctgcgcgcgaggccaagcgatcttcttcttgtccaagataagcctgtctagcttcaagtatgacgggctgatactgggccggcaggcgctccattgcccagtcggcagcgacatccttcggcgcgattttgccggttactgcgctgtaccaaatgcgggacaacgtaagcactacatttcgctcatcgccagcccagtcgggcggcgagttccatagcgttaaggtttcatttagcgcctcaaatagatcctgttcaggaaccggatcaaagagttcctccgccgctggacctaccaaggcaacgctatgttctcttgcttttgtcagcaagatagccagatcaatgtcgatcgtggctggctcgaagatacctgcaagaatgtcattgcgctgccattctccaaattgcagttcgcgcttagctggataacgccacggaatgatgtcgtcgtgcacaacaatggtgacttctacagcgcggagaatctcgctctctccaggggaagccgaagtttccaaaaggtcgttgatcaaagctcgccgcgttgtttcatcaagccttacggtcaccgtaaccagcaaatcaatatcactgtgtggcttcaggccgccatccactgcggagccgtacaaatgtacggccagcaacgtcggttcgagatggcgctcgatgacgccaactacctctgatagttgagtcgatacttcggcgatcaccgcttccctcatactcttcctttttcaatattattgaagcatttatcagggttattgtctcatgagcggatacatatttgaatgtatttagaaaaataggccaaataggccgt

SEQ ID NO: 304 - DNA, 4673 bp, Artificial
  Synthetic
tcagatccttccgtatttagccagtatgttctctagtgtggttcgttgtttttgcgtgagccatgagaacgaaccattgagatcatgcttactttgcatgtcactcaaaaattttgcctcaaaactggtgagctgaatttttgcagttaaagcatcgtgtagtgtttttcttagtccgttacgtaggtaggaatctgatgtaatggttgttggtattttgtcaccattcatttttatctggttgttctcaagttcggttacgagatccatttgtctatctagttcaacttggaaaatcaacgtatcagtcgggcggcctcgcttatcaaccaccaatttcatattgctgtaagtgtttaaatctttacttattggtttcaaaacccattggttaagccttttaaactcatggtagttattttcaagcattaacatgaacttaaattcatcaaggctaatctctatatttgccttgtgagttttcttttgtgttagttcttttaataaccactcataaatcctcatagagtatttgttttcaaaagacttaacatgttccagattatattttatgaatttttttaactggaaaagataaggcaatatctcttcactaaaaactaattctaatttttcgcttgagaacttggcatagtttgtccactggaaaatcttaaagcctttaaccaaaggattcctgatttccacagttctcgtcatcagctctctggttgctttagctaatacaccataagcattttccctactgatgttcatcatctgagcgtattggttataagtgaacgataccgtccgttctttccttgtagggttttcaatcgtggggttgagtagtgccacacagcataaaattagcttggtttcatgctccgttaagtcatagcgactaatcgctagttcatttgctttgaaaacaactaattcagacatacatctcaattggtctaggtgattttaatcactataccaattgagatgggctagtcaatgataattactagtccttttcctttgagttgtgggtatctgtaaattctgctagacctttgctggaaaacttgtaaattctgctagaccctctgtaaattccgctagacctttgtgtgttttttttgtttatattcaagtggttataatttatagaataaagaaagaataaaaaaagataaaaagaatagatcccagccctgtgtataactcactactttagtcagttccgcagtattacaaaaggatgtcgcaaacgctgtttgctcctctacaaaacagaccttaaaaccctaaaggcttaagtagcaccctcgcaagctcgggcaaatcgctgaatattccttttgtctccgaccatcaggcacctgagtcgctgtctttttcgtgacattcagttcgctgcgctcacggctctggcagtgaatgggggtaaatggcactacaggcgccttttatggattcatgcaaggaaactacccataatacaagaaaagcccgtcacgggcttctcagggcgttttatggcgggtctgctatgtggtgctatctgactttttgctgttcagcagttcctgccctctgattttccagtctgaccacttcggattatcccgtgacaggtcattcagactggctaatgcacccagtaaggcagcggtatcatcaacaggcttacccgtcttactgtcaagaggacatccggtcaaataaaacgaaaggctcagtcgaaagactgggcctttcgttttgctgaggagacttagggaccctttatgacaacttgacggctacatcattcactttttcttcacaaccggcacggaactcgctcgggctggccccggtgcattttttaaatacccgcgagaaatagagttgatcgtcaaaaccaacattgcgaccgacggtggcgataggcatccgggtggtgctcaaaagcagcttcgcctggctgatacgttggtcctcgcgccagcttaagacgctaatccctaactgctggcggaaaagatgtgacagacgcgacggcgacaagcaaacatgctgtgcgacgctggcgatatcaaaattgctgtctgccaggtgatcgctgatgtactgacaagcctcgcgtacccgattatccatcggtggatggagcgactcgttaatcgcttccatgcgccgcagtaacaattgctcaagcagatttatcgccagcagctccgaatagcgcccttccccttgcccggcgttaatgatttgcccaaacaggtcgctgaaatgcggctggtgcgcttcatccgggcgaaagaaccccgtattggcaaatattgacggccagttaagccattcatgccagtaggcgcgcggacgaaagtaaacccactggtgataccattcgcgagcctccggatgacgaccgtagtgatgaatctctcctggcgggaacagcaaaatatcacccggtcggcaaacaaattctcgtccctgatttttcaccaccccctgaccgcgaatggtgagattgagaatataacctttcattcccagcggtcggtcgataaaaaaatcgagataaccgttggcctcaatcggcgttaaacccgccaccagatgggcattaaacgagtatcccggcagcaggggatcattttgcgcttcagccatacttttcatactcccaccattcagagaagaaaccaattgtccatattgcatcagacattgccgtcactgcgtcttttactggctcttctcgctaacccaaccggtaaccccgcttattaaaagcattctgtaacaaagcgggaccaaagccatgacaaaaacgcgtaacaaaagtgtctataatcacggcagaaaagtccacattgattatttgcacggcgtcacactttgctatgccatagcatttttatccataagattagcggatcctacctgacgctttttatcgcaactctctactgtttctccatacccgttttacctgcaggtgcagttccgtttgaaggtccgaccaatggccaataatcccggcgccaagaaggcgatccgcaagatcgcccgccgcaccgaagtcaacaccgctcgccgctcgcgcgtgcgcaccttcctgcgcaagttcgaagacgcgatcgccaagggcgatgtcgccgtcgccaaggcggctttcgtggaagctcaatccgagctgatgcgcgctgtctccaagggcgtggttcaccccaacacgggctcgcgcaaggtctcgcgcttggccgcccgtctgaagaagctggacaaggccgcagcctagtcaagattagaccttaaggactaccgcaatgctgaagatccgtctcgcccgtggcggcgccaagaagcgtccgtactactcgatcgtcgtcgccgacagccactcgccgcgcgatggccgcttcatcgagaaggtcggcacctacaacccgctcctcaagaaggacgacgccaaccgcgtcaccctgaaggtcgagtcgatccaggagtggctcaagaagggcgcccagccgaccgaccgcgtcgcccgcttcctggccgcccaaggcctggtcgcctggacgcacggcaacaacccggaaaagggtaagccgggcaagaaggcgcaagagcgtctggccgagcgcgcgcagcgtgaagaagagcgcaagcaagccgaagctgacgccaaggccgccgccgaagctgaaaaggccgccgctgctgaagccgccgccgccgccgccgcggctccggccgttgaagaagccccggctgaagaggctccggccgctgaagctccggctgaagaagccgccgaaggctaatcagggttacttaattaacggcactcctcagccaagtcaaaagcctccggtcggaggcttttgactacatgcccatggcgtttacgccccgccctgccactcatcgcagtactgttgtaattcattaagcattctgccgacatggaagccatcacaaacggcatgatgaacctgaatcgccagcggcatcagcaccttgtcgccttgcgtataatatttgcccatagtgaaaacgggggcgaagaagttgtccatattggccacgtttaaatcaaaactggtgaaactcacccagggattggctgagacgaaaaacatattctcaataaaccctttagggaaataggccaggttttcaccgtaacacgccacatcttgcgaatatatgtgtagaaactgccggaaatcgtcgtggtattcactccagagcgatgaaaacgtttcagtttgctcatggaaaacggtgtaacaagggtgaacactatcccatatcaccagctcaccgtctttcattgccatacggaactccggatgagcattcatcaggcgggcaagaatgtgaataaaggccggataaaacttgtgcttatttttctttacggtctttaaaaaggccgtaatatccagctgaacggtctggttataggtacattgagcaactgactgaaatgcctcaaaatgttctttacgatgccattgggatatatcaacggtggtatatccagtgatttttttctccattttagcttccttagctcctgaaaatctcgataactcaaaaaatacgcccggtagtgatcttatttcattatggtgaaagttggaacctcttacgtgccaggccaaataggccgt

SEQ ID NO: 305 - DNA, 4369 bp, Artificial
  Synthetic
tcagatccttccgtatttagccagtatgttctctagtgtggttcgttgtttttgcgtgagccatgagaacgaaccattgagatcatgcttactttgcatgtcactcaaaaattttgcctcaaaactggtgagctgaatttttgcagttaaagcatcgtgtagtgtttttcttagtccgttacgtaggtaggaatctgatgtaatggttgttggtattttgtcaccattcatttttatctggttgttctcaagttcggttacgagatccatttgtctatctagttcaacttggaaaatcaacgtatcagtcgggcggcctcgcttatcaaccaccaatttcatattgctgtaagtgtttaaatctttacttattggtttcaaaacccattggttaagccttttaaactcatggtagttattttcaagcattaacatgaacttaaattcatcaaggctaatctctatatttgccttgtgagttttcttttgtgttagttcttttaataaccactcataaatcctcatagagtatttgttttcaaaagacttaacatgttccagattatattttatgaatttttttaactggaaaagataaggcaatatctcttcactaaaaactaattctaatttttcgcttgagaacttggcatagtttgtccactggaaaatcttaaagcctttaaccaaaggattcctgatttccacagttctcgtcatcagctctctggttgctttagctaatacaccataagcattttccctactgatgttcatcatctgagcgtattggttataagtgaacgataccgtccgttctttccttgtagggttttcaatcgtggggttgagtagtgccacacagcataaaattagcttggtttcatgctccgttaagtcatagcgactaatcgctagttcatttgctttgaaaacaactaattcagacatacatctcaattggtctaggtgattttaatcactataccaattgagatgggctagtcaatgataattactagtccttttcctttgagttgtgggtatctgtaaattctgctagacctttgctggaaaacttgtaaattctgctagaccctctgtaaattccgctagacctttgtgtgttttttttgtttatattcaagtggttataatttatagaataaagaaagaataaaaaaagataaaaagaatagatcccagccctgtgtataactcactactttagtcagttccgcagtattacaaaaggatgtcgcaaacgctgtttgctcctctacaaaacagaccttaaaaccctaaaggcttaagtagcaccctcgcaagctcgggcaaatcgctgaatattccttttgtctccgaccatcaggcacctgagtcgctgtctttttcgtgacattcagttcgctgcgctcacggctctggcagtgaatgggggtaaatggcactacaggcgccttttatggattcatgcaaggaaactacccataatacaagaaaagcccgtcacgggcttctcagggcgttttatggcgggtctgctatgtggtgctatctgactttttgctgttcagcagttcctgccctctgattttccagtctgaccacttcggattatcccgtgacaggtcattcagactggctaatgcacccagtaaggcagcggtatcatcaacaggcttacccgtcttactgtcaagaggacatccggtcaaataaaacgaaaggctcagtcgaaagactgggcctttcgttttgctgaggagacttagggaccctttatgacaacttgacggctacatcattcactttttcttcacaaccggcacggaactcgctcgggctggccccggtgcattttttaaatacccgcgagaaatagagttgatcgtcaaaaccaacattgcgaccgacggtggcgataggcatccgggtggtgctcaaaagcagcttcgcctggctgatacgttggtcctcgcgccagcttaagacgctaatccctaactgctggcggaaaagatgtgacagacgcgacggcgacaagcaaacatgctgtgcgacgctggcgatatcaaaattgctgtctgccaggtgatcgctgatgtactgacaagcctcgcgtacccgattatccatcggtggatggagcgactcgttaatcgcttccatgcgccgcagtaacaattgctcaagcagatttatcgccagcagctccgaatagcgcccttccccttgcccggcgttaatgatttgcccaaacaggtcgctgaaatgcggctggtgcgcttcatccgggcgaaagaaccccgtattggcaaatattgacggccagttaagccattcatgccagtaggcgcgcggacgaaagtaaacccactggtgataccattcgcgagcctccggatgacgaccgtagtgatgaatctctcctggcgggaacagcaaaatatcacccggtcggcaaacaaattctcgtccctgatttttcaccaccccctgaccgcgaatggtgagattgagaatataacctttcattcccagcggtcggtcgataaaaaaatcgagataaccgttggcctcaatcggcgttaaacccgccaccagatgggcattaaacgagtatcccggcagcaggggatcattttgcgcttcagccatacttttcatactcccaccattcagagaagaaaccaattgtccatattgcatcagacattgccgtcactgcgtcttttactggctcttctcgctaacccaaccggtaaccccgcttattaaaagcattctgtaacaaagcgggaccaaagccatgacaaaaacgcgtaacaaaagtgtctataatcacggcagaaaagtccacattgattatttgcacggcgtcacactttgctatgccatagcatttttatccataagattagcggatcctacctgacgctttttatcgcaactctctactgtttctccatacccgttttacctgcaggtgcagtagaccttaaggactaccgcaatgctgaagatccgtctcgcccgtggcggcgccaagaagcgtccgtactactcgatcgtcgtcgccgacagccactcgccgcgcgatggccgcttcatcgagaaggtcggcacctacaacccgctcctcaagaaggacgacgccaaccgcgtcaccctgaaggtcgagtcgatccaggagtggctcaagaagggcgcccagccgaccgaccgcgtcgcccgcttcctggccgcccaaggcctggtcgcctggacgcacggcaacaacccggaaaagggtaagccgggcaagaaggcgcaagagcgtctggccgagcgcgcgcagcgtgaagaagagcgcaagcaagccgaagctgacgccaaggccgccgccgaagctgaaaaggccgccgctgctgaagccgccgccgccgccgccgcggctccggccgttgaagaagccccggctgaagaggctccggccgctgaagctccggctgaagaagccgccgaaggctaatcagggttacttaattaacggcactcctcagccaagtcaaaagcctccggtcggaggcttttgactacatgcccatggcgtttacgccccgccctgccactcatcgcagtactgttgtaattcattaagcattctgccgacatggaagccatcacaaacggcatgatgaacctgaatcgccagcggcatcagcaccttgtcgccttgcgtataatatttgcccatagtgaaaacgggggcgaagaagttgtccatattggccacgtttaaatcaaaactggtgaaactcacccagggattggctgagacgaaaaacatattctcaataaaccctttagggaaataggccaggttttcaccgtaacacgccacatcttgcgaatatatgtgtagaaactgccggaaatcgtcgtggtattcactccagagcgatgaaaacgtttcagtttgctcatggaaaacggtgtaacaagggtgaacactatcccatatcaccagctcaccgtctttcattgccatacggaactccggatgagcattcatcaggcgggcaagaatgtgaataaaggccggataaaacttgtgcttatttttctttacggtctttaaaaaggccgtaatatccagctgaacggtctggttataggtacattgagcaactgactgaaatgcctcaaaatgttctttacgatgccattgggatatatcaacggtggtatatccagtgatttttttctccattttagcttccttagctcctgaaaatctcgataactcaaaaaatacgcccggtagtgatcttatttcattatggtgaaagttggaacctcttacgtgccaggccaaataggccgt

SEQ ID NO: 306 - DNA, 4147 bp, Artificial
  Synthetic
tcagatccttccgtatttagccagtatgttctctagtgtggttcgttgtttttgcgtgagccatgagaacgaaccattgagatcatgcttactttgcatgtcactcaaaaattttgcctcaaaactggtgagctgaatttttgcagttaaagcatcgtgtagtgtttttcttagtccgttacgtaggtaggaatctgatgtaatggttgttggtattttgtcaccattcatttttatctggttgttctcaagttcggttacgagatccatttgtctatctagttcaacttggaaaatcaacgtatcagtcgggcggcctcgcttatcaaccaccaatttcatattgctgtaagtgtttaaatctttacttattggtttcaaaacccattggttaagccttttaaactcatggtagttattttcaagcattaacatgaacttaaattcatcaaggctaatctctatatttgccttgtgagttttcttttgtgttagttcttttaataaccactcataaatcctcatagagtatttgttttcaaaagacttaacatgttccagattatattttatgaatttttttaactggaaaagataaggcaatatctcttcactaaaaactaattctaatttttcgcttgagaacttggcatagtttgtccactggaaaatcttaaagcctttaaccaaaggattcctgatttccacagttctcgtcatcagctctctggttgctttagctaatacaccataagcattttccctactgatgttcatcatctgagcgtattggttataagtgaacgataccgtccgttctttccttgtagggttttcaatcgtggggttgagtagtgccacacagcataaaattagcttggtttcatgctccgttaagtcatagcgactaatcgctagttcatttgctttgaaaacaactaattcagacatacatctcaattggtctaggtgattttaatcactataccaattgagatgggctagtcaatgataattactagtccttttcctttgagttgtgggtatctgtaaattctgctagacctttgctggaaaacttgtaaattctgctagaccctctgtaaattccgctagacctttgtgtgttttttttgtttatattcaagtggttataatttatagaataaagaaagaataaaaaaagataaaaagaatagatcccagccctgtgtataactcactactttagtcagttccgcagtattacaaaaggatgtcgcaaacgctgtttgctcctctacaaaacagaccttaaaaccctaaaggcttaagtagcaccctcgcaagctcgggcaaatcgctgaatattccttttgtctccgaccatcaggcacctgagtcgctgtctttttcgtgacattcagttcgctgcgctcacggctctggcagtgaatgggggtaaatggcactacaggcgccttttatggattcatgcaaggaaactacccataatacaagaaaagcccgtcacgggcttctcagggcgttttatggcgggtctgctatgtggtgctatctgactttttgctgttcagcagttcctgccctctgattttccagtctgaccacttcggattatcccgtgacaggtcattcagactggctaatgcacccagtaaggcagcggtatcatcaacaggcttacccgtcttactgtcaagaggacatccggtcaaataaaacgaaaggctcagtcgaaagactgggcctttcgttttgctgaggagacttagggaccctttatgacaacttgacggctacatcattcactttttcttcacaaccggcacggaactcgctcgggctggccccggtgcattttttaaatacccgcgagaaatagagttgatcgtcaaaaccaacattgcgaccgacggtggcgataggcatccgggtggtgctcaaaagcagcttcgcctggctgatacgttggtcctcgcgccagcttaagacgctaatccctaactgctggcggaaaagatgtgacagacgcgacggcgacaagcaaacatgctgtgcgacgctggcgatatcaaaattgctgtctgccaggtgatcgctgatgtactgacaagcctcgcgtacccgattatccatcggtggatggagcgactcgttaatcgcttccatgcgccgcagtaacaattgctcaagcagatttatcgccagcagctccgaatagcgcccttccccttgcccggcgttaatgatttgcccaaacaggtcgctgaaatgcggctggtgcgcttcatccgggcgaaagaaccccgtattggcaaatattgacggccagttaagccattcatgccagtaggcgcgcggacgaaagtaaacccactggtgataccattcgcgagcctccggatgacgaccgtagtgatgaatctctcctggcgggaacagcaaaatatcacccggtcggcaaacaaattctcgtccctgatttttcaccaccccctgaccgcgaatggtgagattgagaatataacctttcattcccagcggtcggtcgataaaaaaatcgagataaccgttggcctcaatcggcgttaaacccgccaccagatgggcattaaacgagtatcccggcagcaggggatcattttgcgcttcagccatacttttcatactcccaccattcagagaagaaaccaattgtccatattgcatcagacattgccgtcactgcgtcttttactggctcttctcgctaacccaaccggtaaccccgcttattaaaagcattctgtaacaaagcgggaccaaagccatgacaaaaacgcgtaacaaaagtgtctataatcacggcagaaaagtccacattgattatttgcacggcgtcacactttgctatgccatagcatttttatccataagattagcggatcctacctgacgctttttatcgcaactctctactgtttctccatacccgttttacctgcaggtgcagttccgtttgaaggtccgaccaatggccaataatcccggcgccaagaaggcgatccgcaagatcgcccgccgcaccgaagtcaacaccgctcgccgctcgcgcgtgcgcaccttcctgcgcaagttcgaagacgcgatcgccaagggcgatgtcgccgtcgccaaggcggctttcgtggaagctcaatccgagctgatgcgcgctgtctccaagggcgtggttcaccccaacacgggctcgcgcaaggtctcgcgcttggccgcccgtctgaagaagctggacaaggccgcagcctagtcaagattacttaattaacggcactcctcagccaagtcaaaagcctccggtcggaggcttttgactacatgcccatggcgtttacgccccgccctgccactcatcgcagtactgttgtaattcattaagcattctgccgacatggaagccatcacaaacggcatgatgaacctgaatcgccagcggcatcagcaccttgtcgccttgcgtataatatttgcccatagtgaaaacgggggcgaagaagttgtccatattggccacgtttaaatcaaaactggtgaaactcacccagggattggctgagacgaaaaacatattctcaataaaccctttagggaaataggccaggttttcaccgtaacacgccacatcttgcgaatatatgtgtagaaactgccggaaatcgtcgtggtattcactccagagcgatgaaaacgtttcagtttgctcatggaaaacggtgtaacaagggtgaacactatcccatatcaccagctcaccgtctttcattgccatacggaactccggatgagcattcatcaggcgggcaagaatgtgaataaaggccggataaaacttgtgcttatttttctttacggtctttaaaaaggccgtaatatccagctgaacggtctggttataggtacattgagcaactgactgaaatgcctcaaaatgttctttacgatgccattgggatatatcaacggtggtatatccagtgatttttttctccattttagcttccttagctcctgaaaatctcgataactcaaaaaatacgcccggtagtgatcttatttcattatggtgaaagttggaacctcttacgtgccaggccaaataggccgt

SEQ ID NO: 307 - DNA, 4971 bp, Artificial
  Synthetic
tcagatccttccgtatttagccagtatgttctctagtgtggttcgttgtttttgcgtgagccatgagaacgaaccattgagatcatgcttactttgcatgtcactcaaaaattttgcctcaaaactggtgagctgaatttttgcagttaaagcatcgtgtagtgtttttcttagtccgttacgtaggtaggaatctgatgtaatggttgttggtattttgtcaccattcatttttatctggttgttctcaagttcggttacgagatccatttgtctatctagttcaacttggaaaatcaacgtatcagtcgggcggcctcgcttatcaaccaccaatttcatattgctgtaagtgtttaaatctttacttattggtttcaaaacccattggttaagccttttaaactcatggtagttattttcaagcattaacatgaacttaaattcatcaaggctaatctctatatttgccttgtgagttttcttttgtgttagttcttttaataaccactcataaatcctcatagagtatttgttttcaaaagacttaacatgttccagattatattttatgaatttttttaactggaaaagataaggcaatatctcttcactaaaaactaattctaatttttcgcttgagaacttggcatagtttgtccactggaaaatcttaaagcctttaaccaaaggattcctgatttccacagttctcgtcatcagctctctggttgctttagctaatacaccataagcattttccctactgatgttcatcatctgagcgtattggttataagtgaacgataccgtccgttctttccttgtagggttttcaatcgtggggttgagtagtgccacacagcataaaattagcttggtttcatgctccgttaagtcatagcgactaatcgctagttcatttgctttgaaaacaactaattcagacatacatctcaattggtctaggtgattttaatcactataccaattgagatgggctagtcaatgataattactagtccttttcctttgagttgtgggtatctgtaaattctgctagacctttgctggaaaacttgtaaattctgctagaccctctgtaaattccgctagacctttgtgtgttttttttgtttatattcaagtggttataatttatagaataaagaaagaataaaaaaagataaaaagaatagatcccagccctgtgtataactcactactttagtcagttccgcagtattacaaaaggatgtcgcaaacgctgtttgctcctctacaaaacagaccttaaaaccctaaaggcttaagtagcaccctcgcaagctcgggcaaatcgctgaatattccttttgtctccgaccatcaggcacctgagtcgctgtctttttcgtgacattcagttcgctgcgctcacggctctggcagtgaatgggggtaaatggcactacaggcgccttttatggattcatgcaaggaaactacccataatacaagaaaagcccgtcacgggcttctcagggcgttttatggcgggtctgctatgtggtgctatctgactttttgctgttcagcagttcctgccctctgattttccagtctgaccacttcggattatcccgtgacaggtcattcagactggctaatgcacccagtaaggcagcggtatcatcaacaggcttacccgtcttactgtcaagaggacatccggtcaaataaaacgaaaggctcagtcgaaagactgggcctttcgttttgctgaggagacttagggaccctttatgacaacttgacggctacatcattcactttttcttcacaaccggcacggaactcgctcgggctggccccggtgcattttttaaatacccgcgagaaatagagttgatcgtcaaaaccaacattgcgaccgacggtggcgataggcatccgggtggtgctcaaaagcagcttcgcctggctgatacgttggtcctcgcgccagcttaagacgctaatccctaactgctggcggaaaagatgtgacagacgcgacggcgacaagcaaacatgctgtgcgacgctggcgatatcaaaattgctgtctgccaggtgatcgctgatgtactgacaagcctcgcgtacccgattatccatcggtggatggagcgactcgttaatcgcttccatgcgccgcagtaacaattgctcaagcagatttatcgccagcagctccgaatagcgcccttccccttgcccggcgttaatgatttgcccaaacaggtcgctgaaatgcggctggtgcgcttcatccgggcgaaagaaccccgtattggcaaatattgacggccagttaagccattcatgccagtaggcgcgcggacgaaagtaaacccactggtgataccattcgcgagcctccggatgacgaccgtagtgatgaatctctcctggcgggaacagcaaaatatcacccggtcggcaaacaaattctcgtccctgatttttcaccaccccctgaccgcgaatggtgagattgagaatataacctttcattcccagcggtcggtcgataaaaaaatcgagataaccgttggcctcaatcggcgttaaacccgccaccagatgggcattaaacgagtatcccggcagcaggggatcattttgcgcttcagccatacttttcatactcccaccattcagagaagaaaccaattgtccatattgcatcagacattgccgtcactgcgtcttttactggctcttctcgctaacccaaccggtaaccccgcttattaaaagcattctgtaacaaagcgggaccaaagccatgacaaaaacgcgtaacaaaagtgtctataatcacggcagaaaagtccacattgattatttgcacggcgtcacactttgctatgccatagcatttttatccataagattagcggatcctacctgacgctttttatcgcaactctctactgtttctccatacccgttttacctgcaggtgcagttccgtttgaaggtccgaccaatggccaataatcccggcgccaagaaggcgatccgcaagatcgcccgccgcaccgaagtcaacaccgctcgccgctcgcgcgtgcgcaccttcctgcgcaagttcgaagacgcgatcgccaagggcgatgtcgccgtcgccaaggcggctttcgtggaagctcaatccgagctgatgcgcgctgtctccaagggcgtggttcaccccaacacgggctcgcgcaaggtctcgcgcttggccgcccgtctgaagaagctggacaaggccgcagcctagtcaagattagaccttaaggactaccgcaatgctgaagatccgtctcgcccgtggcggcgccaagaagcgtccgtactactcgatcgtcgtcgccgacagccactcgccgcgcgatggccgcttcatcgagaaggtcggcacctacaacccgctcctcaagaaggacgacgccaaccgcgtcaccctgaaggtcgagtcgatccaggagtggctcaagaagggcgcccagccgaccgaccgcgtcgcccgcttcctggccgcccaaggcctggtcgcctggacgcacggcaacaacccggaaaagggtaagccgggcaagaaggcgcaagagcgtctggccgagcgcgcgcagcgtgaagaagagcgcaagcaagccgaagctgacgccaaggccgccgccgaagctgaaaaggccgccgctgctgaagccgccgccgccgccgccgcggctccggccgttgaagaagccccggctgaagaggctccggccgctgaagctccggctgaagaagccgccgaaggctaatcagggttacctgagcggagacaacccgatgtcgatcactctcgagcgcaaggccgctcttatcgccgaacacgcccgtagcacgggtgacaccggcagcgccgaagtccaggtcgcgatcctctccgagcgtatcgccaacctgaccgagcacttcaagacgcacaagaaggacaaccacagccgtcgtggcctgctgaagctggtttcccagcgtcgccggcttctcgaccacctgaagaagtccgacgccgctcgctaccagtccctgatcgaaaagctgggcctgcgtcgctaaggcatcaaacttaattaacggcactcctcagccaagtcaaaagcctccggtcggaggcttttgactacatgcccatggcgtttacgccccgccctgccactcatcgcagtactgttgtaattcattaagcattctgccgacatggaagccatcacaaacggcatgatgaacctgaatcgccagcggcatcagcaccttgtcgccttgcgtataatatttgcccatagtgaaaacgggggcgaagaagttgtccatattggccacgtttaaatcaaaactggtgaaactcacccagggattggctgagacgaaaaacatattctcaataaaccctttagggaaataggccaggttttcaccgtaacacgccacatcttgcgaatatatgtgtagaaactgccggaaatcgtcgtggtattcactccagagcgatgaaaacgtttcagtttgctcatggaaaacggtgtaacaagggtgaacactatcccatatcaccagctcaccgtctttcattgccatacggaactccggatgagcattcatcaggcgggcaagaatgtgaataaaggccggataaaacttgtgcttatttttctttacggtctttaaaaaggccgtaatatccagctgaacggtctggttataggtacattgagcaactgactgaaatgcctcaaaatgttctttacgatgccattgggatatatcaacggtggtatatccagtgatttttttctccattttagcttccttagctcctgaaaatctcgataactcaaaaaatacgcccggtagtgatcttatttcattatggtgaaagttggaacctcttacgtgccaggccaaataggccgt

SEQ ID NO: 308 - DNA, 6716 bp, Artificial
  Synthetic
tcagatccttccgtatttagccagtatgttctctagtgtggttcgttgtttttgcgtgagccatgagaacgaaccattgagatcatgcttactttgcatgtcactcaaaaattttgcctcaaaactggtgagctgaatttttgcagttaaagcatcgtgtagtgtttttcttagtccgttacgtaggtaggaatctgatgtaatggttgttggtattttgtcaccattcatttttatctggttgttctcaagttcggttacgagatccatttgtctatctagttcaacttggaaaatcaacgtatcagtcgggcggcctcgcttatcaaccaccaatttcatattgctgtaagtgtttaaatctttacttattggtttcaaaacccattggttaagccttttaaactcatggtagttattttcaagcattaacatgaacttaaattcatcaaggctaatctctatatttgccttgtgagttttcttttgtgttagttcttttaataaccactcataaatcctcatagagtatttgttttcaaaagacttaacatgttccagattatattttatgaatttttttaactggaaaagataaggcaatatctcttcactaaaaactaattctaatttttcgcttgagaacttggcatagtttgtccactggaaaatcttaaagcctttaaccaaaggattcctgatttccacagttctcgtcatcagctctctggttgctttagctaatacaccataagcattttccctactgatgttcatcatctgagcgtattggttataagtgaacgataccgtccgttctttccttgtagggttttcaatcgtggggttgagtagtgccacacagcataaaattagcttggtttcatgctccgttaagtcatagcgactaatcgctagttcatttgctttgaaaacaactaattcagacatacatctcaattggtctaggtgattttaatcactataccaattgagatgggctagtcaatgataattactagtccttttcctttgagttgtgggtatctgtaaattctgctagacctttgctggaaaacttgtaaattctgctagaccctctgtaaattccgctagacctttgtgtgttttttttgtttatattcaagtggttataatttatagaataaagaaagaataaaaaaagataaaaagaatagatcccagccctgtgtataactcactactttagtcagttccgcagtattacaaaaggatgtcgcaaacgctgtttgctcctctacaaaacagaccttaaaaccctaaaggcttaagtagcaccctcgcaagctcgggcaaatcgctgaatattccttttgtctccgaccatcaggcacctgagtcgctgtctttttcgtgacattcagttcgctgcgctcacggctctggcagtgaatgggggtaaatggcactacaggcgccttttatggattcatgcaaggaaactacccataatacaagaaaagcccgtcacgggcttctcagggcgttttatggcgggtctgctatgtggtgctatctgactttttgctgttcagcagttcctgccctctgattttccagtctgaccacttcggattatcccgtgacaggtcattcagactggctaatgcacccagtaaggcagcggtatcatcaacaggcttacccgtcttactgtcaagaggacatccggtcaaataaaacgaaaggctcagtcgaaagactgggcctttcgttttgctgaggagacttagggaccctttatgacaacttgacggctacatcattcactttttcttcacaaccggcacggaactcgctcgggctggccccggtgcattttttaaatacccgcgagaaatagagttgatcgtcaaaaccaacattgcgaccgacggtggcgataggcatccgggtggtgctcaaaagcagcttcgcctggctgatacgttggtcctcgcgccagcttaagacgctaatccctaactgctggcggaaaagatgtgacagacgcgacggcgacaagcaaacatgctgtgcgacgctggcgatatcaaaattgctgtctgccaggtgatcgctgatgtactgacaagcctcgcgtacccgattatccatcggtggatggagcgactcgttaatcgcttccatgcgccgcagtaacaattgctcaagcagatttatcgccagcagctccgaatagcgcccttccccttgcccggcgttaatgatttgcccaaacaggtcgctgaaatgcggctggtgcgcttcatccgggcgaaagaaccccgtattggcaaatattgacggccagttaagccattcatgccagtaggcgcgcggacgaaagtaaacccactggtgataccattcgcgagcctccggatgacgaccgtagtgatgaatctctcctggcgggaacagcaaaatatcacccggtcggcaaacaaattctcgtccctgatttttcaccaccccctgaccgcgaatggtgagattgagaatataacctttcattcccagcggtcggtcgataaaaaaatcgagataaccgttggcctcaatcggcgttaaacccgccaccagatgggcattaaacgagtatcccggcagcaggggatcattttgcgcttcagccatacttttcatactcccaccattcagagaagaaaccaattgtccatattgcatcagacattgccgtcactgcgtcttttactggctcttctcgctaacccaaccggtaaccccgcttattaaaagcattctgtaacaaagcgggaccaaagccatgacaaaaacgcgtaacaaaagtgtctataatcacggcagaaaagtccacattgattatttgcacggcgtcacactttgctatgccatagcatttttatccataagattagcggatcctacctgacgctttttatcgcaactctctactgtttctccatacccgttttacctgcaggtgcagttccgtttgaaggtccgaccaatggccaataatcccggcgccaagaaggcgatccgcaagatcgcccgccgcaccgaagtcaacaccgctcgccgctcgcgcgtgcgcaccttcctgcgcaagttcgaagacgcgatcgccaagggcgatgtcgccgtcgccaaggcggctttcgtggaagctcaatccgagctgatgcgcgctgtctccaagggcgtggttcaccccaacacgggctcgcgcaaggtctcgcgcttggccgcccgtctgaagaagctggacaaggccgcagcctagtcaagattagaccttaaggactaccgcaatgctgaagatccgtctcgcccgtggcggcgccaagaagcgtccgtactactcgatcgtcgtcgccgacagccactcgccgcgcgatggccgcttcatcgagaaggtcggcacctacaacccgctcctcaagaaggacgacgccaaccgcgtcaccctgaaggtcgagtcgatccaggagtggctcaagaagggcgcccagccgaccgaccgcgtcgcccgcttcctggccgcccaaggcctggtcgcctggacgcacggcaacaacccggaaaagggtaagccgggcaagaaggcgcaagagcgtctggccgagcgcgcgcagcgtgaagaagagcgcaagcaagccgaagctgacgccaaggccgccgccgaagctgaaaaggccgccgctgctgaagccgccgccgccgccgccgcggctccggccgttgaagaagccccggctgaagaggctccggccgctgaagctccggctgaagaagccgccgaaggctaatcagggttcctagagaccaaagatcagcatggctgacgatatgagcttcaacccgacgcgcgacgatttcgaagcgctcctcaacgactccatgggcggccgtgacttcgccgaaggcaccgtcgtcaagggcaaggtcgtcgggatcgaaaaggacttcgccatcatcgacgtcggtctgaagaccgaaggccgcgtccagctgaaggaattcggcgtcgacgagaacggcaaggccaccgtgaaggccggcgacaccgtcgaagtcttcctggaacgcctcgaaaacgccatgggcgaagcggtcatcagccgcgaaaaggccaagcgcgaagaagcttggacccgtctggagggcgtctacgcccgcaacgagcccgtcatgggcgcgatcgtcggccgcgtgaagggtggcttcaccgtcgacctgggcggcgcctcggccttcctgccgggcagccaagtcgacatccgtccggtccgcgacgtcggtccgctgatgggcaaggaacagcccttcgccatcctgaagatggaccgtccgcgcggcaacatcgtcgtctcgcgtcgcgccatcctggaagaagcccgcgccgagcagcgcaccgaactggtgtcgcagctgcaagagggtgaaatccgcgaaggcgtcgtcaagaacatcaccgactacggtgcgttcgttgacctgggcggcatcgacggcctgctgcacgtcaccgacatgagctggaagcgcgtcaaccacccgagccaagtgctcgccgtgggcgacaccgtgaaggtccagatcgtcaagatcaacccggacacccagcgcatcagcctcggcatgaagcagctgcagtcggatccgtgggacggcgtcgaagccaagtacccggtcggcgccaagttcacgggccgcatcaccaacatcaccgactacggcgccttcgtggagctggaagccggcgttgaaggcctggtgcacgtctcggaaatgtcctggaccaagaagaacgttcaccccggcaagatcgtctcgacctcgcaggaagtcgacgtcgtggtcctggacgtcgatccgtccaagcgccgcgtctcgctgggcctgaagcaagccctggccaacccgtgggaagccttcctggaagctcacccggtcggttcgaccgtcgaaggcgaagtcaagaacgcgaccgagtttggtctgttcgtcggcctcgacaacgacatcgacggcatggtgcacttgtcggacatcgactggagcgtcccgggcgaagaagccatggcccgctacaagaagggcgacatggtcaaggcgaaggttctcgacgtcgacgtcgagaaggaacgcatctcgctgggcatcaagcagctggccggcgacccgatgtcgggcgacacctaccgcaagaaccagaccgtgaccgtcaccgtcacggaagtcacctcgggcggcatcgaagttcgcttcggcgaagacgacgctccgatgaccgccttcatccgcaagtcggacctgtcgcgcgatcgtcaagagcagcgtccggagcgcttcgccgtgggtgaccgcgtcgacgctcagatcaccaacgtggacaaggccgcgcgccgcgtctcgctgtcgatcaagtcgctggaaatggccgaagagaaggaagccatcgagcagttcggctcgtcggactccggcgcttcgctgggcgacatcctgggcgcggccctgcgcgagcgggcctccaaggactaatatgaaagacgaagcacctgagcggagacaacccgatgtcgatcactctcgagcgcaaggccgctcttatcgccgaacacgcccgtagcacgggtgacaccggcagcgccgaagtccaggtcgcgatcctctccgagcgtatcgccaacctgaccgagcacttcaagacgcacaagaaggacaaccacagccgtcgtggcctgctgaagctggtttcccagcgtcgccggcttctcgaccacctgaagaagtccgacgccgctcgctaccagtccctgatcgaaaagctgggcctgcgtcgctaaggcatcaaacttaattaacggcactcctcagccaagtcaaaagcctccggtcggaggcttttgactacatgcccatggcgtttacgccccgccctgccactcatcgcagtactgttgtaattcattaagcattctgccgacatggaagccatcacaaacggcatgatgaacctgaatcgccagcggcatcagcaccttgtcgccttgcgtataatatttgcccatagtgaaaacgggggcgaagaagttgtccatattggccacgtttaaatcaaaactggtgaaactcacccagggattggctgagacgaaaaacatattctcaataaaccctttagggaaataggccaggttttcaccgtaacacgccacatcttgcgaatatatgtgtagaaactgccggaaatcgtcgtggtattcactccagagcgatgaaaacgtttcagtttgctcatggaaaacggtgtaacaagggtgaacactatcccatatcaccagctcaccgtctttcattgccatacggaactccggatgagcattcatcaggcgggcaagaatgtgaataaaggccggataaaacttgtgcttatttttctttacggtctttaaaaaggccgtaatatccagctgaacggtctggttataggtacattgagcaactgactgaaatgcctcaaaatgttctttacgatgccattgggatatatcaacggtggtatatccagtgatttttttctccattttagcttccttagctcctgaaaatctcgataactcaaaaaatacgcccggtagtgatcttatttcattatggtgaaagttggaacctcttacgtgccaggccaaataggccgt

SEQ ID NO: 309 - DNA, 4499 bp, Artificial
  Synthetic
tcagatccttccgtatttagccagtatgttctctagtgtggttcgttgtttttgcgtgagccatgagaacgaaccattgagatcatgcttactttgcatgtcactcaaaaattttgcctcaaaactggtgagctgaatttttgcagttaaagcatcgtgtagtgtttttcttagtccgttacgtaggtaggaatctgatgtaatggttgttggtattttgtcaccattcatttttatctggttgttctcaagttcggttacgagatccatttgtctatctagttcaacttggaaaatcaacgtatcagtcgggcggcctcgcttatcaaccaccaatttcatattgctgtaagtgtttaaatctttacttattggtttcaaaacccattggttaagccttttaaactcatggtagttattttcaagcattaacatgaacttaaattcatcaaggctaatctctatatttgccttgtgagttttcttttgtgttagttcttttaataaccactcataaatcctcatagagtatttgttttcaaaagacttaacatgttccagattatattttatgaatttttttaactggaaaagataaggcaatatctcttcactaaaaactaattctaatttttcgcttgagaacttggcatagtttgtccactggaaaatcttaaagcctttaaccaaaggattcctgatttccacagttctcgtcatcagctctctggttgctttagctaatacaccataagcattttccctactgatgttcatcatctgagcgtattggttataagtgaacgataccgtccgttctttccttgtagggttttcaatcgtggggttgagtagtgccacacagcataaaattagcttggtttcatgctccgttaagtcatagcgactaatcgctagttcatttgctttgaaaacaactaattcagacatacatctcaattggtctaggtgattttaatcactataccaattgagatgggctagtcaatgataattactagtccttttcctttgagttgtgggtatctgtaaattctgctagacctttgctggaaaacttgtaaattctgctagaccctctgtaaattccgctagacctttgtgtgttttttttgtttatattcaagtggttataatttatagaataaagaaagaataaaaaaagataaaaagaatagatcccagccctgtgtataactcactactttagtcagttccgcagtattacaaaaggatgtcgcaaacgctgtttgctcctctacaaaacagaccttaaaaccctaaaggcttaagtagcaccctcgcaagctcgggcaaatcgctgaatattccttttgtctccgaccatcaggcacctgagtcgctgtctttttcgtgacattcagttcgctgcgctcacggctctggcagtgaatgggggtaaatggcactacaggcgccttttatggattcatgcaaggaaactacccataatacaagaaaagcccgtcacgggcttctcagggcgttttatggcgggtctgctatgtggtgctatctgactttttgctgttcagcagttcctgccctctgattttccagtctgaccacttcggattatcccgtgacaggtcattcagactggctaatgcacccagtaaggcagcggtatcatcaacaggcttacccgtcttactgtcaagaggacatccggtcaaataaaacgaaaggctcagtcgaaagactgggcctttcgttttgctgaggagacttagggaccctttatgacaacttgacggctacatcattcactttttcttcacaaccggcacggaactcgctcgggctggccccggtgcattttttaaatacccgcgagaaatagagttgatcgtcaaaaccaacattgcgaccgacggtggcgataggcatccgggtggtgctcaaaagcagcttcgcctggctgatacgttggtcctcgcgccagcttaagacgctaatccctaactgctggcggaaaagatgtgacagacgcgacggcgacaagcaaacatgctgtgcgacgctggcgatatcaaaattgctgtctgccaggtgatcgctgatgtactgacaagcctcgcgtacccgattatccatcggtggatggagcgactcgttaatcgcttccatgcgccgcagtaacaattgctcaagcagatttatcgccagcagctccgaatagcgcccttccccttgcccggcgttaatgatttgcccaaacaggtcgctgaaatgcggctggtgcgcttcatccgggcgaaagaaccccgtattggcaaatattgacggccagttaagccattcatgccagtaggcgcgcggacgaaagtaaacccactggtgataccattcgcgagcctccggatgacgaccgtagtgatgaatctctcctggcgggaacagcaaaatatcacccggtcggcaaacaaattctcgtccctgatttttcaccaccccctgaccgcgaatggtgagattgagaatataacctttcattcccagcggtcggtcgataaaaaaatcgagataaccgttggcctcaatcggcgttaaacccgccaccagatgggcattaaacgagtatcccggcagcaggggatcattttgcgcttcagccatacttttcatactcccaccattcagagaagaaaccaattgtccatattgcatcagacattgccgtcactgcgtcttttactggctcttctcgctaacccaaccggtaaccccgcttattaaaagcattctgtaacaaagcgggaccaaagccatgacaaaaacgcgtaacaaaagtgtctataatcacggcagaaaagtccacattgattatttgcacggcgtcacactttgctatgccatagcatttttatccataagattagcggatcctacctgacgctttttatcgcaactctctactgtttctccatacccgttttacctgcaggtgcagtgctgcaggatttgagagatcatggctaatacgtcttccgccaagaaagcgacccgcaagatcgcccggcgcaccgcggtgaacaagtcgcgtcggactcagatgcgcgggtcggtccggatcgtcgaagaggcgatcgccagcggcgaccgcgatgcggcgctgaaggcgatggctcgcgccgagccggagctgatgcgcgccgctcagcgcaacatcatccaccggaacgccgcgagccggaaggtgtcgcgtctgacgcacagcatcgccaagctggcgaagtaattctcaccaccccacctaaggagctaacatgtccgtcgttatccgcctcgcgcgcgctggtaccaagaagcgcccgttctatcatgtcgtcgtcgccgactcgcgcttcccgcgcgatggccgcttcatcgagcgtctcggctacttcaacccgctgatggcgaaggacaacgaagcccgcctgaagctcgacctcgacaaggtcaaggattggctcgccaagggcgcgcagccgtcggatcgcgtcgcccgcttcctcgacaccgccggtgtccgcaagcgtgaagcccgcaacaaccccgagaaggcggtgccgcgcaaggagcgcaaggccgccgacggcaagtaagcggggcgattgatgccgtcacttaattaacggcactcctcagccaagtcaaaagcctccggtcggaggcttttgactacatgcccatggcgtttacgccccgccctgccactcatcgcagtactgttgtaattcattaagcattctgccgacatggaagccatcacaaacggcatgatgaacctgaatcgccagcggcatcagcaccttgtcgccttgcgtataatatttgcccatagtgaaaacgggggcgaagaagttgtccatattggccacgtttaaatcaaaactggtgaaactcacccagggattggctgagacgaaaaacatattctcaataaaccctttagggaaataggccaggttttcaccgtaacacgccacatcttgcgaatatatgtgtagaaactgccggaaatcgtcgtggtattcactccagagcgatgaaaacgtttcagtttgctcatggaaaacggtgtaacaagggtgaacactatcccatatcaccagctcaccgtctttcattgccatacggaactccggatgagcattcatcaggcgggcaagaatgtgaataaaggccggataaaacttgtgcttatttttctttacggtctttaaaaaggccgtaatatccagctgaacggtctggttataggtacattgagcaactgactgaaatgcctcaaaatgttctttacgatgccattgggatatatcaacggtggtatatccagtgatttttttctccattttagcttccttagctcctgaaaatctcgataactcaaaaaatacgcccggtagtgatcttatttcattatggtgaaagttggaacctcttacgtgccaggccaaataggccgt

SEQ ID NO: 310 - DNA, 6225 bp, Artificial
  Synthetic
tcagatccttccgtatttagccagtatgttctctagtgtggttcgttgtttttgcgtgagccatgagaacgaaccattgagatcatgcttactttgcatgtcactcaaaaattttgcctcaaaactggtgagctgaatttttgcagttaaagcatcgtgtagtgtttttcttagtccgttacgtaggtaggaatctgatgtaatggttgttggtattttgtcaccattcatttttatctggttgttctcaagttcggttacgagatccatttgtctatctagttcaacttggaaaatcaacgtatcagtcgggcggcctcgcttatcaaccaccaatttcatattgctgtaagtgtttaaatctttacttattggtttcaaaacccattggttaagccttttaaactcatggtagttattttcaagcattaacatgaacttaaattcatcaaggctaatctctatatttgccttgtgagttttcttttgtgttagttcttttaataaccactcataaatcctcatagagtatttgttttcaaaagacttaacatgttccagattatattttatgaatttttttaactggaaaagataaggcaatatctcttcactaaaaactaattctaatttttcgcttgagaacttggcatagtttgtccactggaaaatcttaaagcctttaaccaaaggattcctgatttccacagttctcgtcatcagctctctggttgctttagctaatacaccataagcattttccctactgatgttcatcatctgagcgtattggttataagtgaacgataccgtccgttctttccttgtagggttttcaatcgtggggttgagtagtgccacacagcataaaattagcttggtttcatgctccgttaagtcatagcgactaatcgctagttcatttgctttgaaaacaactaattcagacatacatctcaattggtctaggtgattttaatcactataccaattgagatgggctagtcaatgataattactagtccttttcctttgagttgtgggtatctgtaaattctgctagacctttgctggaaaacttgtaaattctgctagaccctctgtaaattccgctagacctttgtgtgttttttttgtttatattcaagtggttataatttatagaataaagaaagaataaaaaaagataaaaagaatagatcccagccctgtgtataactcactactttagtcagttccgcagtattacaaaaggatgtcgcaaacgctgtttgctcctctacaaaacagaccttaaaaccctaaaggcttaagtagcaccctcgcaagctcgggcaaatcgctgaatattccttttgtctccgaccatcaggcacctgagtcgctgtctttttcgtgacattcagttcgctgcgctcacggctctggcagtgaatgggggtaaatggcactacaggcgccttttatggattcatgcaaggaaactacccataatacaagaaaagcccgtcacgggcttctcagggcgttttatggcgggtctgctatgtggtgctatctgactttttgctgttcagcagttcctgccctctgattttccagtctgaccacttcggattatcccgtgacaggtcattcagactggctaatgcacccagtaaggcagcggtatcatcaacaggcttacccgtcttactgtcaagaggacatccggtcaaataaaacgaaaggctcagtcgaaagactgggcctttcgttttgctgaggagacttagggaccctttatgacaacttgacggctacatcattcactttttcttcacaaccggcacggaactcgctcgggctggccccggtgcattttttaaatacccgcgagaaatagagttgatcgtcaaaaccaacattgcgaccgacggtggcgataggcatccgggtggtgctcaaaagcagcttcgcctggctgatacgttggtcctcgcgccagcttaagacgctaatccctaactgctggcggaaaagatgtgacagacgcgacggcgacaagcaaacatgctgtgcgacgctggcgatatcaaaattgctgtctgccaggtgatcgctgatgtactgacaagcctcgcgtacccgattatccatcggtggatggagcgactcgttaatcgcttccatgcgccgcagtaacaattgctcaagcagatttatcgccagcagctccgaatagcgcccttccccttgcccggcgttaatgatttgcccaaacaggtcgctgaaatgcggctggtgcgcttcatccgggcgaaagaaccccgtattggcaaatattgacggccagttaagccattcatgccagtaggcgcgcggacgaaagtaaacccactggtgataccattcgcgagcctccggatgacgaccgtagtgatgaatctctcctggcgggaacagcaaaatatcacccggtcggcaaacaaattctcgtccctgatttttcaccaccccctgaccgcgaatggtgagattgagaatataacctttcattcccagcggtcggtcgataaaaaaatcgagataaccgttggcctcaatcggcgttaaacccgccaccagatgggcattaaacgagtatcccggcagcaggggatcattttgcgcttcagccatacttttcatactcccaccattcagagaagaaaccaattgtccatattgcatcagacattgccgtcactgcgtcttttactggctcttctcgctaacccaaccggtaaccccgcttattaaaagcattctgtaacaaagcgggaccaaagccatgacaaaaacgcgtaacaaaagtgtctataatcacggcagaaaagtccacattgattatttgcacggcgtcacactttgctatgccatagcatttttatccataagattagcggatcctacctgacgctttttatcgcaactctctactgtttctccatacccgttttacctgcaggtgcagtgctgcaggatttgagagatcatggctaatacgtcttccgccaagaaagcgacccgcaagatcgcccggcgcaccgcggtgaacaagtcgcgtcggactcagatgcgcgggtcggtccggatcgtcgaagaggcgatcgccagcggcgaccgcgatgcggcgctgaaggcgatggctcgcgccgagccggagctgatgcgcgccgctcagcgcaacatcatccaccggaacgccgcgagccggaaggtgtcgcgtctgacgcacagcatcgccaagctggcgaagtaattctcaccaccccacctaaggagctaacatgtccgtcgttatccgcctcgcgcgcgctggtaccaagaagcgcccgttctatcatgtcgtcgtcgccgactcgcgcttcccgcgcgatggccgcttcatcgagcgtctcggctacttcaacccgctgatggcgaaggacaacgaagcccgcctgaagctcgacctcgacaaggtcaaggattggctcgccaagggcgcgcagccgtcggatcgcgtcgcccgcttcctcgacaccgccggtgtccgcaagcgtgaagcccgcaacaaccccgagaaggcggtgccgcgcaaggagcgcaaggccgccgacggcaagtaagcggggcgattgatgccgtccatccgcatctggagaacaaatggcttcgactgacacttacaacccgacccgcgacgatttcgccgcgatgctcgacgagtccttcgccggcggcaacctgcaggaaagctctgttatcaagggcaaggtcgtcgcgatcgagaaggacatggccgtcattgacgtcggcctgaagaccgaaggccgcgtgccgctgcgcgaattcgcaggtccgggccgcgacaacgagatcaaggtcggcgataccgtcgaggtgttcctcgatcggatcgagaatgcgctcggcgaagccgtgctgtcgcgcgacaaggcgcgccgcgaagagagctggggcaagctcgagaaggccttccagaacaacgagaaggtgttcggcgtcatcttcaatcaggtcaagggcggcttcacggtcgacctcgacggcgccgtggcgttcctgccgcgctcgcaggtagacattcgtccgatccgcgacgttgcgccgctgatgaacaactcgcagccgttccagatcctcaagatggatcgccgccgtggcaacatcgtcgtgtcgcgccggaccgtgctggaagagacccgcgccgagcagcgccaggagctggtgcagaacctcgaagagggtcaggtgatcgacggcgtcgtcaagaacatcaccgattacggtgcgttcgtcgacctcggcggcatcgacggcctgctgcacgtgaccgatatcgcctggcgccgggtcaatcacccgaccgaggtgctgaccatcggccagaccgtcaaggtcaagatcatcaagatcaaccacgagacccaccgcatctcgctcggcatgaagcagctgctggacgatccgtggcagggcatcgaggccaagtacccgctgaacgcgcgcttcaccggccgcgtgaccaacatcaccgactacggtgcgttcgtcgagctcgagccgggcatcgaaggcctgatccacgtctccgagatgtcgtggaccaagaagaacatgcaccccggcaagatcgtttcgacctctcaggaagtcgaagtgcaggtgctcgaggtggattcggtcaagcgccgtatctcgctcggtctcaagcagaccatgcgcaatccgtgggaagtgttcgtcgagaagcatccggtcggttcgaccgtcgaaggcgaggtcaagaacaagaccgagttcggtctgttcctgggtctcgacggcgacgtcgacggcatggtccacctctcggacctcgactggaagctgccgggcgagcaggtgatcgacaacttcaagaagggcgacatggtcaaggccgtggtgctcgacgtggacgtcgaaaaggagcgcatctcgctcggcgtcaagcagctcgaaggcgaccccttcgccgagccgggcgacgtcaagaagggtgctgtcgtgacctgcgaagtgctcgacgtgaaggaaagcggcatcgacgtgcagatcgtcggcaccgacttcaacaccttcatcaagcgctcggagctggcgcgcgaccgcaacgaccagcgcagcgaccgcttcgcggttggtgagaaggtcgacgcccgcgtcatccagttcgacaagaaggcccgcaaggtccaggtgtcgatcaaggcgctggaagtggccgaggagaaggaagccatcgcgcagtacggctcgtccgattcgggcgcgacgctgggcgacattctcggcaccgcgctcaagcagcgcgacaagtaagcctcaggacttaattaacggcactcctcagccaagtcaaaagcctccggtcggaggcttttgactacatgcccatggcgtttacgccccgccctgccactcatcgcagtactgttgtaattcattaagcattctgccgacatggaagccatcacaaacggcatgatgaacctgaatcgccagcggcatcagcaccttgtcgccttgcgtataatatttgcccatagtgaaaacgggggcgaagaagttgtccatattggccacgtttaaatcaaaactggtgaaactcacccagggattggctgagacgaaaaacatattctcaataaaccctttagggaaataggccaggttttcaccgtaacacgccacatcttgcgaatatatgtgtagaaactgccggaaatcgtcgtggtattcactccagagcgatgaaaacgtttcagtttgctcatggaaaacggtgtaacaagggtgaacactatcccatatcaccagctcaccgtctttcattgccatacggaactccggatgagcattcatcaggcgggcaagaatgtgaataaaggccggataaaacttgtgcttatttttctttacggtctttaaaaaggccgtaatatccagctgaacggtctggttataggtacattgagcaactgactgaaatgcctcaaaatgttctttacgatgccattgggatatatcaacggtggtatatccagtgatttttttctccattttagcttccttagctcctgaaaatctcgataactcaaaaaatacgcccggtagtgatcttatttcattatggtgaaagttggaacctcttacgtgccaggccaaataggccgt

SEQ ID NO: 311 - DNA, 4804 bp, Artificial
  Synthetic
tcagatccttccgtatttagccagtatgttctctagtgtggttcgttgtttttgcgtgagccatgagaacgaaccattgagatcatgcttactttgcatgtcactcaaaaattttgcctcaaaactggtgagctgaatttttgcagttaaagcatcgtgtagtgtttttcttagtccgttacgtaggtaggaatctgatgtaatggttgttggtattttgtcaccattcatttttatctggttgttctcaagttcggttacgagatccatttgtctatctagttcaacttggaaaatcaacgtatcagtcgggcggcctcgcttatcaaccaccaatttcatattgctgtaagtgtttaaatctttacttattggtttcaaaacccattggttaagccttttaaactcatggtagttattttcaagcattaacatgaacttaaattcatcaaggctaatctctatatttgccttgtgagttttcttttgtgttagttcttttaataaccactcataaatcctcatagagtatttgttttcaaaagacttaacatgttccagattatattttatgaatttttttaactggaaaagataaggcaatatctcttcactaaaaactaattctaatttttcgcttgagaacttggcatagtttgtccactggaaaatcttaaagcctttaaccaaaggattcctgatttccacagttctcgtcatcagctctctggttgctttagctaatacaccataagcattttccctactgatgttcatcatctgagcgtattggttataagtgaacgataccgtccgttctttccttgtagggttttcaatcgtggggttgagtagtgccacacagcataaaattagcttggtttcatgctccgttaagtcatagcgactaatcgctagttcatttgctttgaaaacaactaattcagacatacatctcaattggtctaggtgattttaatcactataccaattgagatgggctagtcaatgataattactagtccttttcctttgagttgtgggtatctgtaaattctgctagacctttgctggaaaacttgtaaattctgctagaccctctgtaaattccgctagacctttgtgtgttttttttgtttatattcaagtggttataatttatagaataaagaaagaataaaaaaagataaaaagaatagatcccagccctgtgtataactcactactttagtcagttccgcagtattacaaaaggatgtcgcaaacgctgtttgctcctctacaaaacagaccttaaaaccctaaaggcttaagtagcaccctcgcaagctcgggcaaatcgctgaatattccttttgtctccgaccatcaggcacctgagtcgctgtctttttcgtgacattcagttcgctgcgctcacggctctggcagtgaatgggggtaaatggcactacaggcgccttttatggattcatgcaaggaaactacccataatacaagaaaagcccgtcacgggcttctcagggcgttttatggcgggtctgctatgtggtgctatctgactttttgctgttcagcagttcctgccctctgattttccagtctgaccacttcggattatcccgtgacaggtcattcagactggctaatgcacccagtaaggcagcggtatcatcaacaggcttacccgtcttactgtcaagaggacatccggtcaaataaaacgaaaggctcagtcgaaagactgggcctttcgttttgctgaggagacttagggaccctttatgacaacttgacggctacatcattcactttttcttcacaaccggcacggaactcgctcgggctggccccggtgcattttttaaatacccgcgagaaatagagttgatcgtcaaaaccaacattgcgaccgacggtggcgataggcatccgggtggtgctcaaaagcagcttcgcctggctgatacgttggtcctcgcgccagcttaagacgctaatccctaactgctggcggaaaagatgtgacagacgcgacggcgacaagcaaacatgctgtgcgacgctggcgatatcaaaattgctgtctgccaggtgatcgctgatgtactgacaagcctcgcgtacccgattatccatcggtggatggagcgactcgttaatcgcttccatgcgccgcagtaacaattgctcaagcagatttatcgccagcagctccgaatagcgcccttccccttgcccggcgttaatgatttgcccaaacaggtcgctgaaatgcggctggtgcgcttcatccgggcgaaagaaccccgtattggcaaatattgacggccagttaagccattcatgccagtaggcgcgcggacgaaagtaaacccactggtgataccattcgcgagcctccggatgacgaccgtagtgatgaatctctcctggcgggaacagcaaaatatcacccggtcggcaaacaaattctcgtccctgatttttcaccaccccctgaccgcgaatggtgagattgagaatataacctttcattcccagcggtcggtcgataaaaaaatcgagataaccgttggcctcaatcggcgttaaacccgccaccagatgggcattaaacgagtatcccggcagcaggggatcattttgcgcttcagccatacttttcatactcccaccattcagagaagaaaccaattgtccatattgcatcagacattgccgtcactgcgtcttttactggctcttctcgctaacccaaccggtaaccccgcttattaaaagcattctgtaacaaagcgggaccaaagccatgacaaaaacgcgtaacaaaagtgtctataatcacggcagaaaagtccacattgattatttgcacggcgtcacactttgctatgccatagcatttttatccataagattagcggatcctacctgacgctttttatcgcaactctctactgtttctccatacccgttttacctgcaggtgcagtgctgcaggatttgagagatcatggctaatacgtcttccgccaagaaagcgacccgcaagatcgcccggcgcaccgcggtgaacaagtcgcgtcggactcagatgcgcgggtcggtccggatcgtcgaagaggcgatcgccagcggcgaccgcgatgcggcgctgaaggcgatggctcgcgccgagccggagctgatgcgcgccgctcagcgcaacatcatccaccggaacgccgcgagccggaaggtgtcgcgtctgacgcacagcatcgccaagctggcgaagtaattctcaccaccccacctaaggagctaacatgtccgtcgttatccgcctcgcgcgcgctggtaccaagaagcgcccgttctatcatgtcgtcgtcgccgactcgcgcttcccgcgcgatggccgcttcatcgagcgtctcggctacttcaacccgctgatggcgaaggacaacgaagcccgcctgaagctcgacctcgacaaggtcaaggattggctcgccaagggcgcgcagccgtcggatcgcgtcgcccgcttcctcgacaccgccggtgtccgcaagcgtgaagcccgcaacaaccccgagaaggcggtgccgcgcaaggagcgcaaggccgccgacggcaagtaagcggggcgattgatgccgtccgcaaggaaagtatctgacgatgtcgattaccgcagaacgcaaagcggaagtcatcaagaccagcgccaccaaggccggtgataccggttcgcccgaggttcaggtcgcgatcctgtcggaacgcatcaccaacctgaccgcgcacttcaagacccacaccaaggacaaccactcccgccgtgggctgttgaagctggtgtcgacgcgccgttcgcttctcgactacatcaagaagaaggacgaagcgcgctacaaggcgctgctcgagaagcacaacatccgtcgctgaggcgtcggacgaccgacttaattaacggcactcctcagccaagtcaaaagcctccggtcggaggcttttgactacatgcccatggcgtttacgccccgccctgccactcatcgcagtactgttgtaattcattaagcattctgccgacatggaagccatcacaaacggcatgatgaacctgaatcgccagcggcatcagcaccttgtcgccttgcgtataatatttgcccatagtgaaaacgggggcgaagaagttgtccatattggccacgtttaaatcaaaactggtgaaactcacccagggattggctgagacgaaaaacatattctcaataaaccctttagggaaataggccaggttttcaccgtaacacgccacatcttgcgaatatatgtgtagaaactgccggaaatcgtcgtggtattcactccagagcgatgaaaacgtttcagtttgctcatggaaaacggtgtaacaagggtgaacactatcccatatcaccagctcaccgtctttcattgccatacggaactccggatgagcattcatcaggcgggcaagaatgtgaataaaggccggataaaacttgtgcttatttttctttacggtctttaaaaaggccgtaatatccagctgaacggtctggttataggtacattgagcaactgactgaaatgcctcaaaatgttctttacgatgccattgggatatatcaacggtggtatatccagtgatttttttctccattttagcttccttagctcctgaaaatctcgataactcaaaaaatacgcccggtagtgatcttatttcattatggtgaaagttggaacctcttacgtgccaggccaaataggccgt

SEQ ID NO: 312 - DNA, 6530 bp, Artificial
  Synthetic
tcagatccttccgtatttagccagtatgttctctagtgtggttcgttgtttttgcgtgagccatgagaacgaaccattgagatcatgcttactttgcatgtcactcaaaaattttgcctcaaaactggtgagctgaatttttgcagttaaagcatcgtgtagtgtttttcttagtccgttacgtaggtaggaatctgatgtaatggttgttggtattttgtcaccattcatttttatctggttgttctcaagttcggttacgagatccatttgtctatctagttcaacttggaaaatcaacgtatcagtcgggcggcctcgcttatcaaccaccaatttcatattgctgtaagtgtttaaatctttacttattggtttcaaaacccattggttaagccttttaaactcatggtagttattttcaagcattaacatgaacttaaattcatcaaggctaatctctatatttgccttgtgagttttcttttgtgttagttcttttaataaccactcataaatcctcatagagtatttgttttcaaaagacttaacatgttccagattatattttatgaatttttttaactggaaaagataaggcaatatctcttcactaaaaactaattctaatttttcgcttgagaacttggcatagtttgtccactggaaaatcttaaagcctttaaccaaaggattcctgatttccacagttctcgtcatcagctctctggttgctttagctaatacaccataagcattttccctactgatgttcatcatctgagcgtattggttataagtgaacgataccgtccgttctttccttgtagggttttcaatcgtggggttgagtagtgccacacagcataaaattagcttggtttcatgctccgttaagtcatagcgactaatcgctagttcatttgctttgaaaacaactaattcagacatacatctcaattggtctaggtgattttaatcactataccaattgagatgggctagtcaatgataattactagtccttttcctttgagttgtgggtatctgtaaattctgctagacctttgctggaaaacttgtaaattctgctagaccctctgtaaattccgctagacctttgtgtgttttttttgtttatattcaagtggttataatttatagaataaagaaagaataaaaaaagataaaaagaatagatcccagccctgtgtataactcactactttagtcagttccgcagtattacaaaaggatgtcgcaaacgctgtttgctcctctacaaaacagaccttaaaaccctaaaggcttaagtagcaccctcgcaagctcgggcaaatcgctgaatattccttttgtctccgaccatcaggcacctgagtcgctgtctttttcgtgacattcagttcgctgcgctcacggctctggcagtgaatgggggtaaatggcactacaggcgccttttatggattcatgcaaggaaactacccataatacaagaaaagcccgtcacgggcttctcagggcgttttatggcgggtctgctatgtggtgctatctgactttttgctgttcagcagttcctgccctctgattttccagtctgaccacttcggattatcccgtgacaggtcattcagactggctaatgcacccagtaaggcagcggtatcatcaacaggcttacccgtcttactgtcaagaggacatccggtcaaataaaacgaaaggctcagtcgaaagactgggcctttcgttttgctgaggagacttagggaccctttatgacaacttgacggctacatcattcactttttcttcacaaccggcacggaactcgctcgggctggccccggtgcattttttaaatacccgcgagaaatagagttgatcgtcaaaaccaacattgcgaccgacggtggcgataggcatccgggtggtgctcaaaagcagcttcgcctggctgatacgttggtcctcgcgccagcttaagacgctaatccctaactgctggcggaaaagatgtgacagacgcgacggcgacaagcaaacatgctgtgcgacgctggcgatatcaaaattgctgtctgccaggtgatcgctgatgtactgacaagcctcgcgtacccgattatccatcggtggatggagcgactcgttaatcgcttccatgcgccgcagtaacaattgctcaagcagatttatcgccagcagctccgaatagcgcccttccccttgcccggcgttaatgatttgcccaaacaggtcgctgaaatgcggctggtgcgcttcatccgggcgaaagaaccccgtattggcaaatattgacggccagttaagccattcatgccagtaggcgcgcggacgaaagtaaacccactggtgataccattcgcgagcctccggatgacgaccgtagtgatgaatctctcctggcgggaacagcaaaatatcacccggtcggcaaacaaattctcgtccctgatttttcaccaccccctgaccgcgaatggtgagattgagaatataacctttcattcccagcggtcggtcgataaaaaaatcgagataaccgttggcctcaatcggcgttaaacccgccaccagatgggcattaaacgagtatcccggcagcaggggatcattttgcgcttcagccatacttttcatactcccaccattcagagaagaaaccaattgtccatattgcatcagacattgccgtcactgcgtcttttactggctcttctcgctaacccaaccggtaaccccgcttattaaaagcattctgtaacaaagcgggaccaaagccatgacaaaaacgcgtaacaaaagtgtctataatcacggcagaaaagtccacattgattatttgcacggcgtcacactttgctatgccatagcatttttatccataagattagcggatcctacctgacgctttttatcgcaactctctactgtttctccatacccgttttacctgcaggtgcagtgctgcaggatttgagagatcatggctaatacgtcttccgccaagaaagcgacccgcaagatcgcccggcgcaccgcggtgaacaagtcgcgtcggactcagatgcgcgggtcggtccggatcgtcgaagaggcgatcgccagcggcgaccgcgatgcggcgctgaaggcgatggctcgcgccgagccggagctgatgcgcgccgctcagcgcaacatcatccaccggaacgccgcgagccggaaggtgtcgcgtctgacgcacagcatcgccaagctggcgaagtaattctcaccaccccacctaaggagctaacatgtccgtcgttatccgcctcgcgcgcgctggtaccaagaagcgcccgttctatcatgtcgtcgtcgccgactcgcgcttcccgcgcgatggccgcttcatcgagcgtctcggctacttcaacccgctgatggcgaaggacaacgaagcccgcctgaagctcgacctcgacaaggtcaaggattggctcgccaagggcgcgcagccgtcggatcgcgtcgcccgcttcctcgacaccgccggtgtccgcaagcgtgaagcccgcaacaaccccgagaaggcggtgccgcgcaaggagcgcaaggccgccgacggcaagtaagcggggcgattgatgccgtccatccgcatctggagaacaaatggcttcgactgacacttacaacccgacccgcgacgatttcgccgcgatgctcgacgagtccttcgccggcggcaacctgcaggaaagctctgttatcaagggcaaggtcgtcgcgatcgagaaggacatggccgtcattgacgtcggcctgaagaccgaaggccgcgtgccgctgcgcgaattcgcaggtccgggccgcgacaacgagatcaaggtcggcgataccgtcgaggtgttcctcgatcggatcgagaatgcgctcggcgaagccgtgctgtcgcgcgacaaggcgcgccgcgaagagagctggggcaagctcgagaaggccttccagaacaacgagaaggtgttcggcgtcatcttcaatcaggtcaagggcggcttcacggtcgacctcgacggcgccgtggcgttcctgccgcgctcgcaggtagacattcgtccgatccgcgacgttgcgccgctgatgaacaactcgcagccgttccagatcctcaagatggatcgccgccgtggcaacatcgtcgtgtcgcgccggaccgtgctggaagagacccgcgccgagcagcgccaggagctggtgcagaacctcgaagagggtcaggtgatcgacggcgtcgtcaagaacatcaccgattacggtgcgttcgtcgacctcggcggcatcgacggcctgctgcacgtgaccgatatcgcctggcgccgggtcaatcacccgaccgaggtgctgaccatcggccagaccgtcaaggtcaagatcatcaagatcaaccacgagacccaccgcatctcgctcggcatgaagcagctgctggacgatccgtggcagggcatcgaggccaagtacccgctgaacgcgcgcttcaccggccgcgtgaccaacatcaccgactacggtgcgttcgtcgagctcgagccgggcatcgaaggcctgatccacgtctccgagatgtcgtggaccaagaagaacatgcaccccggcaagatcgtttcgacctctcaggaagtcgaagtgcaggtgctcgaggtggattcggtcaagcgccgtatctcgctcggtctcaagcagaccatgcgcaatccgtgggaagtgttcgtcgagaagcatccggtcggttcgaccgtcgaaggcgaggtcaagaacaagaccgagttcggtctgttcctgggtctcgacggcgacgtcgacggcatggtccacctctcggacctcgactggaagctgccgggcgagcaggtgatcgacaacttcaagaagggcgacatggtcaaggccgtggtgctcgacgtggacgtcgaaaaggagcgcatctcgctcggcgtcaagcagctcgaaggcgaccccttcgccgagccgggcgacgtcaagaagggtgctgtcgtgacctgcgaagtgctcgacgtgaaggaaagcggcatcgacgtgcagatcgtcggcaccgacttcaacaccttcatcaagcgctcggagctggcgcgcgaccgcaacgaccagcgcagcgaccgcttcgcggttggtgagaaggtcgacgcccgcgtcatccagttcgacaagaaggcccgcaaggtccaggtgtcgatcaaggcgctggaagtggccgaggagaaggaagccatcgcgcagtacggctcgtccgattcgggcgcgacgctgggcgacattctcggcaccgcgctcaagcagcgcgacaagtaagcctcaggcgcaaggaaagtatctgacgatgtcgattaccgcagaacgcaaagcggaagtcatcaagaccagcgccaccaaggccggtgataccggttcgcccgaggttcaggtcgcgatcctgtcggaacgcatcaccaacctgaccgcgcacttcaagacccacaccaaggacaaccactcccgccgtgggctgttgaagctggtgtcgacgcgccgttcgcttctcgactacatcaagaagaaggacgaagcgcgctacaaggcgctgctcgagaagcacaacatccgtcgctgaggcgtcggacgaccgacttaattaacggcactcctcagccaagtcaaaagcctccggtcggaggcttttgactacatgcccatggcgtttacgccccgccctgccactcatcgcagtactgttgtaattcattaagcattctgccgacatggaagccatcacaaacggcatgatgaacctgaatcgccagcggcatcagcaccttgtcgccttgcgtataatatttgcccatagtgaaaacgggggcgaagaagttgtccatattggccacgtttaaatcaaaactggtgaaactcacccagggattggctgagacgaaaaacatattctcaataaaccctttagggaaataggccaggttttcaccgtaacacgccacatcttgcgaatatatgtgtagaaactgccggaaatcgtcgtggtattcactccagagcgatgaaaacgtttcagtttgctcatggaaaacggtgtaacaagggtgaacactatcccatatcaccagctcaccgtctttcattgccatacggaactccggatgagcattcatcaggcgggcaagaatgtgaataaaggccggataaaacttgtgcttatttttctttacggtctttaaaaaggccgtaatatccagctgaacggtctggttataggtacattgagcaactgactgaaatgcctcaaaatgttctttacgatgccattgggatatatcaacggtggtatatccagtgatttttttctccattttagcttccttagctcctgaaaatctcgataactcaaaaaatacgcccggtagtgatcttatttcattatggtgaaagttggaacctcttacgtgccaggccaaataggccgt

SEQ ID NO: 313 - DNA, 6226 bp, Artificial; identical to SEQ ID NO: 204
  Synthetic

SEQ ID NO: 314 - DNA, 4713 bp, Artificial; identical to SEQ ID NO: 162
  Synthetic

SEQ ID NO: 315 - DNA, 4568 bp, Artificial
  Synthetic
tcagatccttccgtatttagccagtatgttctctagtgtggttcgttgtttttgcgtgagccatgagaacgaaccattgagatcatgcttactttgcatgtcactcaaaaattttgcctcaaaactggtgagctgaatttttgcagttaaagcatcgtgtagtgtttttcttagtccgttacgtaggtaggaatctgatgtaatggttgttggtattttgtcaccattcatttttatctggttgttctcaagttcggttacgagatccatttgtctatctagttcaacttggaaaatcaacgtatcagtcgggcggcctcgcttatcaaccaccaatttcatattgctgtaagtgtttaaatctttacttattggtttcaaaacccattggttaagccttttaaactcatggtagttattttcaagcattaacatgaacttaaattcatcaaggctaatctctatatttgccttgtgagttttcttttgtgttagttcttttaataaccactcataaatcctcatagagtatttgttttcaaaagacttaacatgttccagattatattttatgaatttttttaactggaaaagataaggcaatatctcttcactaaaaactaattctaatttttcgcttgagaacttggcatagtttgtccactggaaaatcttaaagcctttaaccaaaggattcctgatttccacagttctcgtcatcagctctctggttgctttagctaatacaccataagcattttccctactgatgttcatcatctgagcgtattggttataagtgaacgataccgtccgttctttccttgtagggttttcaatcgtggggttgagtagtgccacacagcataaaattagcttggtttcatgctccgttaagtcatagcgactaatcgctagttcatttgctttgaaaacaactaattcagacatacatctcaattggtctaggtgattttaatcactataccaattgagatgggctagtcaatgataattactagtccttttcctttgagttgtgggtatctgtaaattctgctagacctttgctggaaaacttgtaaattctgctagaccctctgtaaattccgctagacctttgtgtgttttttttgtttatattcaagtggttataatttatagaataaagaaagaataaaaaaagataaaaagaatagatcccagccctgtgtataactcactactttagtcagttccgcagtattacaaaaggatgtcgcaaacgctgtttgctcctctacaaaacagaccttaaaaccctaaaggcttaagtagcaccctcgcaagctcgggcaaatcgctgaatattccttttgtctccgaccatcaggcacctgagtcgctgtctttttcgtgacattcagttcgctgcgctcacggctctggcagtgaatgggggtaaatggcactacaggcgccttttatggattcatgcaaggaaactacccataatacaagaaaagcccgtcacgggcttctcagggcgttttatggcgggtctgctatgtggtgctatctgactttttgctgttcagcagttcctgccctctgattttccagtctgaccacttcggattatcccgtgacaggtcattcagactggctaatgcacccagtaaggcagcggtatcatcaacaggcttacccgtcttactgtcaagaggacatccggtcaaataaaacgaaaggctcagtcgaaagactgggcctttcgttttgctgaggagacttagggaccctttatgacaacttgacggctacatcattcactttttcttcacaaccggcacggaactcgctcgggctggccccggtgcattttttaaatacccgcgagaaatagagttgatcgtcaaaaccaacattgcgaccgacggtggcgataggcatccgggtggtgctcaaaagcagcttcgcctggctgatacgttggtcctcgcgccagcttaagacgctaatccctaactgctggcggaaaagatgtgacagacgcgacggcgacaagcaaacatgctgtgcgacgctggcgatatcaaaattgctgtctgccaggtgatcgctgatgtactgacaagcctcgcgtacccgattatccatcggtggatggagcgactcgttaatcgcttccatgcgccgcagtaacaattgctcaagcagatttatcgccagcagctccgaatagcgcccttccccttgcccggcgttaatgatttgcccaaacaggtcgctgaaatgcggctggtgcgcttcatccgggcgaaagaaccccgtattggcaaatattgacggccagttaagccattcatgccagtaggcgcgcggacgaaagtaaacccactggtgataccattcgcgagcctccggatgacgaccgtagtgatgaatctctcctggcgggaacagcaaaatatcacccggtcggcaaacaaattctcgtccctgatttttcaccaccccctgaccgcgaatggtgagattgagaatataacctttcattcccagcggtcggtcgataaaaaaatcgagataaccgttggcctcaatcggcgttaaacccgccaccagatgggcattaaacgagtatcccggcagcaggggatcattttgcgcttcagccatacttttcatactcccaccattcagagaagaaaccaattgtccatattgcatcagacattgccgtcactgcgtcttttactggctcttctcgctaacccaaccggtaaccccgcttattaaaagcattctgtaacaaagcgggaccaaagccatgacaaaaacgcgtaacaaaagtgtctataatcacggcagaaaagtccacattgattatttgcacggcgtcacactttgctatgccatagcatttttatccataagattagcggatcctacctgacgctttttatcgcaactctctactgtttctccatacccgttttacctgcaggtgcagtaggaggaaaaaaaaatggtgagcaagggcgaggaggataacatggccatcatcaaggagttcatgcgcttcaaggtgcacatggagggctccgtgaacggccacgagttcgagatcgagggcgagggcgagggccgcccctacgagggcacccagaccgccaagctgaaggtgaccaagggcggccccctgcccttcgcctgggacatcctgtcccctcagttcatgtacggctccaaggcctacgtgaagcaccccgccgacatccccgactacttgaagctgtccttccccgagggcttcaagtgggagcgcgtgatgaacttcgaggacggcggcgtggtgaccgtgacccaggactcctccctacaggacggcgagttcatctacaaggtgaagctgcgcggcaccaacttcccctccgacggccccgtaatgcagaagaagaccatgggctgggaggcctcctccgagcggatgtaccccgaggacggcgccctgaagggcgagatcaagcagaggctgaagctgaaggacggcggccactacgacgccgaggtcaagaccacctacaaggccaagaagcccgtgcagctgcccggcgcctacaacgtcaacatcaagctggacatcacctcccacaacgaggactacaccatcgtggaacagtacgagcgcgccgagggccgccactccaccggcggcatggacgagctgtacaagtaaacttaattaacggcactcctcagccaagtcaaaagcctccggtcggaggcttttgactacatgcccatggcgtttacgccccgccctgccactcatcgcagtactgttgtaattcattaagcattctgccgacatggaagccatcacaaacggcatgatgaacctgaatcgccagcggcatcagcaccttgtcgccttgcgtataatatttgcccatagtgaaaacgggggcgaagaagttgtccatattggccacgtttaaatcaaaactggtgaaactcacccagggattggctgagacgaaaaacatattctcaataaaccctttagggaaataggccaggttttcaccgtaacacgccacatcttgcgaatatatgtgtagaaactgccggaaatcgtcgtggtattcactccagagcgatgaaaacgtttcagtttgctcatggaaaacggtgtaacaagggtgaacactatcccatatcaccagctcaccgtctttcattgccatacggaactccggatgagcattcatcaggcgggcaagaatgtgaataaaggccggataaaacttgtgcttatttttctttacggtctttaaaaaggccgtaatatccagctgaacggtctggttataggtacattgagcaactgactgaaatgcctcaaaatgttctttacgatgccattgggatatatcaacggtggtatatccagtgatttttttctccattttagcttccttagctcctgaaaatctcgataactcaaaaaatacgcccggtagtgatcttatttcattatggtgaaagttggaacctcttacgtgccaagccaaataggccgt

SEQ ID NO: 316 - DNA, 8920 bp, Artificial
  Synthetic
tcagatccttccgtatttagccagtatgttctctagtgtggttcgttgtttttgcgtgagccatgagaacgaaccattgagatcatgcttactttgcatgtcactcaaaaattttgcctcaaaactggtgagctgaatttttgcagttaaagcatcgtgtagtgtttttcttagtccgttacgtaggtaggaatctgatgtaatggttgttggtattttgtcaccattcatttttatctggttgttctcaagttcggttacgagatccatttgtctatctagttcaacttggaaaatcaacgtatcagtcgggcggcctcgcttatcaaccaccaatttcatattgctgtaagtgtttaaatctttacttattggtttcaaaacccattggttaagccttttaaactcatggtagttattttcaagcattaacatgaacttaaattcatcaaggctaatctctatatttgccttgtgagttttcttttgtgttagttcttttaataaccactcataaatcctcatagagtatttgttttcaaaagacttaacatgttccagattatattttatgaatttttttaactggaaaagataaggcaatatctcttcactaaaaactaattctaatttttcgcttgagaacttggcatagtttgtccactggaaaatctcaaagcctttaaccaaaggattcctgatttccacagttctcgtcatcagctctctggttgctttagctaatacaccataagcattttccctactgatgttcatcatctgagcgtattggttataagtgaacgataccgtccgttctttccttgtagggttttcaatcgtggggttgagtagtgccacacagcataaaattagcttggtttcatgctccgttaagtcatagcgactaatcgctagttcatttgctttgaaaacaactaattcagacatacatctcaattggtctaggtgattttaatcactataccaattgagatgggctagtcaatgataattactagtccttttcctttgagttgtgggtatctgtaaattctgctagacctttgctggaaaacttgtaaattctgctagaccctctgtaaattccgctagacctttgtgtgttttttttgtttatattcaagtggttataatttatagaataaagaaagaataaaaaaagataaaaagaatagatcccagccctgtgtataactcactactttagtcagttccgcagtattacaaaaggatgtcgcaaacgctgtttgctcctctacaaaacagaccttaaaaccctaaaggcttaagtagcaccctcgcaagctcgggcaaatcgctgaatattccttttgtctccgaccatcaggcacctgagtcgctgtctttttcgtgacattcagttcgctgcgctcacggctctggcagtgaatgggggtaaatggcactacaggcgccttttatggattcatgcaaggaaactacccataatacaagaaaagcccgtcacgggcttctcagggcgttttatggcgggtctgctatgtggtgctatctgactttttgctgttcagcagttcctgccctctgattttccagtctgaccacttcggattatcccgtgacaggtcattcagactggctaatgcacccagtaaggcagcggtatcatcaacaggcttacccgtcttactgtcaagaggacatccggtcaaataaaacgaaaggctcagtcgaaagactgggcctttcgttttgctgaggagacttagggaccctttatgacaacttgacggctacatcattcactttttcttcacaaccggcacggaactcgctcgggctggccccggtgcattttttaaatacccgcgagaaatagagttgatcgtcaaaaccaacattgcgaccgacggtggcgataggcatccgggtggtgctcaaaagcagcttcgcctggctgatacgttggtcctcgcgccagcttaagacgctaatccctaactgctggcggaaaagatgtgacagacgcgacggcgacaagcaaacatgctgtgcgacgctggcgatatcaaaattgctgtctgccaggtgatcgctgatgtactgacaagcctcgcgtacccgattatccatcggtggatggagcgactcgttaatcgcttccatgcgccgcagtaacaattgctcaagcagatttatcgccagcagctccgaatagcgcccttccccttgcccggcgttaatgatttgcccaaacaggtcgctgaaatgcggctggtgcgcttcatccgggcgaaagaaccccgtattggcaaatattgacggccagttaagccattcatgccagtaggcgcgcggacgaaagtaaacccactggtgataccattcgcgagcctccggatgacgaccgtagtgatgaatctctcctggcgggaacagcaaaatatcacccggtcggcaaacaaattctcgtccctgatttttcaccaccccctgaccgcgaatggtgagattgagaatataacctttcattcccagcggtcggtcgataaaaaaatcgagataaccgttggcctcaatcggcgttaaacccgccaccagatgggcattaaacgagtatcccggcagcaggggatcattttgcgcttcagccatacttttcatactcccaccattcagagaagaaaccaattgtccatattgcatcagacattgccgtcactgcgtcttttactggctcttctcgctaacccaaccggtaaccccgcttattaaaagcattctgtaacaaagcgggaccaaagccatgacaaaaacgcgtaacaaaagtgtctataatcacggcagaaaagtccacattgattatttgcacggcgtcacactttgctatgccatagcatttttatccataagattagcggatcctacctgacgctttttatcgcaactctctactgtttctccatacccgttttacctgcaggtgcagttatatttggcttggagtttactggtatgtctaaccagagaattcgtatccgtcttaagtcttttgatcatcgtctgattgatcaatctgctcaagagatcgtagaaaccgctaagcgtaccggcgcacaagtttgtggtccaattccgatgcctactcgcatcgaacgcttcaacgttcttacttcaccgcacgttaacaaagatgcgcgtgaccagtacgaaatccgcacctacaaacgtttgatcgacatcgttcaacctacagataaaactgttgatgcattgatgaagttagatcttgcagctggtgttgatgttcagatcgctttgggttaaggctttcggttaattaacgattagttaattaggccgcttttttagaggtttatgcacatggctattggtttagtcggtcgcaaatgtggtatgactcgcatctttacagatgctggtgtttctgtacctgttacagtcatcgaagtcgatccaaaccgcattacgcaaatcaaaacacttgaaactgatggttatcaagctgttcaagtaactaccggtgaacgtcgcgaatctcgcgtaactaacgctcagaaaggtcacttcgcgaaagctggtgttgctgctggtcgcttggttaaagaattccgtgttactgaagctgagcttgaaggtcgtgaagttggcggtactattggcgttgatttgttcacagttggtcaaattgttgacgtaactggtcaatcaaaaggtaaaggtttccaaggtggtgttaaacgttggaacttccgtacccaagacgctactcacggtaactcagtttctcaccgtgtattaggttctacaggtcaaaaccaaactcctggacgcgtgttcaaaggcaaaaaaatggctggtcacttaggtgatgaacgcgtaacagtacaaggtcttgaaatcgtatctattgacgctgaacgttctgttttagttgttaaaggtgcaattcctggtgcaactggcggtgacgtaattgtacgtcctaccatcaaggcctgaggggaaataccgtgaatttgaaaactgtttccggctctgctgttgaattgtctgaagttgctttcggacgtgaatttaacgaggctcttgtacaccaagttgttactgcttatttagcaggtggtcgtcaaggtactcgtgctcaaaaatcgcgtgcagacgtttctggcggtggtaaaaaaccattccgtcaaaaaggtactggtcgtgctcgtgcgggttctattcgtagccctatctgggttggtggcggtaaaacttttgctgctcgtccacaagattggtctcaaaaagtaaaccgtaagatgtaccgcggtgcaatgcaatgtatcttagctgaacttgttcgccaagatcgccttgtattagttgaagagtttgctgttgcagctccaaaaactaaagaattgcttgcaaaacttaacgacttaaatgctgctcgtgcattaatcgttactgacgctgtagatgagaacttatatcttgcagcacgtaaccttccacatgtagatgtggtagatgcaactgcaatcgatcctgtaagcttgatcgcgtttgataaagttgtgatgtctgtagctgctgctaagaaaattgaggtagaactcggatgaacaacgaacgtatctatcaagtccttaaaggaccagtcttctcagaaaaggcacaagttttaggtgatactgttggtgttcaagtatttaaagtagacatcaatgctactaaacttgaaatcaaaaaagcagttgaaaaactttttggtgtagaagttgttaaagttaacacaactattactaaaggtaagactaagcgctttggtcgtacattaggacgtcgttctgatgttaaaaaagcatacgtcaccctgaaagccggccaagatgttgaaatggctgacttgggcgataccgctgaaagcgcagcggaataaggacgaaaattatgccgattcaaaaatgtaagccaacgtctccaggacgtcgctttgtagagaaagtggttcatgaccatcttcacaaaggcgctccttacgcaccgttggttgaagctaaaaaacgtactggtggtcgtaataacaacggtcacattactactcgtcacgttggtggtggtcataaacaacactaccgtatcgttgacttcaaacgtaacaaagacagcatcccagctgttgtagagcgtattgaatacgatccaaaccgtacagcacatattgctttattgaaatatgctgacggtgagcgtcgttatatcattgcacctaaaggtttacgtgctggcgataaagtacaatctggtaacgatgctccaattcgtccaggtaactgcttgccacttcgtaatatgccgatcggttctacacttcataacgttgaacttaaaattggtaagggtgcacaattagcgcgttctgctggtgcttctgttcagttgttgggtcgtgatggttcttacgcgattattcgtcttcgttcaggcgaaatgcgtaaagtgcatgttgaatgccgcgctgtaattggtgaagtttctaaccaagaaaacaaccttcgttcattgggtaaagctggtgcttcacgctggcgtggtgttcgtcctaccgtacgtggtatggcgatgaacccgattgaccacccacacggtggtggtgaagggcgtaacaaaggtattcaacctgtaagcccatggggtcaaaaagctaaagggtacaagacacgtaccaataagcgtacgactaagatgattattcgcgaccgtcgcgtcaagtaaaggaatctgactaatgcctcgttctctgaaaaaaggcccattcgtcgatgcgcacttgttcgctaaggttgaagcggctgttgctagtaactctcgcaagccgatcaaaacttggtctcgtcgttcgatgatccttccagattttgttggtttaacaatctctgttcataatggtcgtaatcacgttccagtaattgttactgagcatatggttggtcataaactcggtgaattcgcgccaactcgtacctatcgtggtcacggtgttgacaagaaatctaaacgttaataggtgtcatgatggaagtaactgctaaattacgcggtgccgctatctcggcacaaaaagcacgtttggttgcagatcttattcgcggcaaatctgttgcgcatgctttaaacatcttaaacttcagcaataaaaaagctgctgttttagtaaaaaaagcattggaatctgcgattgcaaacgctgaacacaataacagtttagatgttgacgatcttaaagtttctacgatttacgttgatgaaggcatgagccttaaacgtattatgccacgtgctaaaggccgtgcagatcgtattactaagcgtacttgtcacatcaccgttaaggtaggggtttgatatgggtcagaaggttcatccaatcggtatccgcctaggtgttgtgaaacgtcataacgctaactggtatgcgaatccgaaacaatacgctgaatacttgcttaaagatcttcaagttcgtgagtttttaactaaaaaacttaagaatgcgatggtaagcaatattcttatcgaacgtccatcaggcgctgctaaagtaactattagcacagctcgtcctggtatcgtaatcggtaaaaaaggcgaagatattgagaaattacagcgcgaacttaccagcattatgggtgttccagcgcaagtaagtatcaacgaaattgatcgcccagacttagatgcgcgtttagttgctgaagcaattgcttctcaattagaaaagcgtgttatgttccgtcgtgctatgaagcgtgcggttcaaaacactatgcgtgctggtgctaaaggtatcaaagttgaagtgtctggccgtttaggtggtgcagagattgctcgtacagaatggtatcgtgaaggtcgtgtacctttgcatacattacgtgcagacattgactatgcaactatgcgtgcagaaacaacttacggtacgattggtgttaaagtttggattttccgtggcgagatcttaggtggcatgaaacaagtcatgaaccctgctcctgctgaagatcgtccagctaaacgtggtcgtggtcgtggtgaaggtcaagagcgtcgtggtcgtcgcggtgaccgtgctgctgacaagggagaataatccatgttgcaacctaaacgtaccaaattccgtaaagtgcacaaaggccgtaacactggtctagcgcatcgtggtagtacagtatcatttggttcgattgcaattaaagcaactgaacgtggtcgtatgactgcgcgtcagattgaagctgcacgtcgtactattagccgccgtattaagcgtggtggtaaaatctttattcgcgtattcccggataaaccaattactcaaaagcctcttgaagtgcgtatgggtaaaggtaagggtagcgtggaatactgggtttgccagatccaaccaggtaagatcctgtacgaaattgaaggtgtgaacgaagaattagcgcgtgaagcatttgctttagctgctgctaaacttccgtttaaaaccactatcgtgactcggacggtaatgtaatgaaaactaaagatctacgtgaaaaatcggtagaagagttgaaagctttgcttgatgagcagcagcttaaccaattccgtcttcgtatggcgaaagcaactggtcagttgggtaaatcgcacgaagtgcaagttgctcgtaagacaattgctcgtattaagacactccttaccgaaaaacaggggaacggacaatgagtgaaaaaacagtccgcacgttaaccggcaaagtcgtaagtgacaaaatggataaatctattgttgttcttattgaacgccgcgttcaacacccgttgtatggcaagtcaattcgccgttcaactaagttacacgctcatgatgagaacaacgttgctaaaattggtgatgttgtaaccattaaagaaagccgcccaatttctaaaactaaagcttggactttagtggaagtagttgaagcagctgctgagtaattcgacgttcttgttgcatcatcggacttaattaacggcactcctcagccaagtcaaaagcctccggtcggaggcttttgactacatgcccatggcgtttacgccccgccctgccactcatcgcagtactgttgtaattcattaagcattctgccgacatggaagccatcacaaacggcatgatgaacctgaatcgccagcggcatcagcaccttgtcgccttgcgtataatatttgcccatagtgaaaacgggggcgaagaagttgtccatattggccacgtttaaatcaaaactggtgaaactcacccagggattggctgagacgaaaaacatattctcaataaaccctttagggaaataggccaggttttcaccgtaacacgccacatcttgcgaatatatgtgtagaaactgccggaaatcgtcgtggtattcactccagagcgatgaaaacgtttcagtttgctcatggaaaacggtgtaacaagggtgaacactatcccatatcaccagctcaccgtctttcattgccatacggaactccggatgagcattcatcaggcgggcaagaatgtgaataaaggccggataaaacttgtgcttatttttctttacggtctttaaaaaggccgtaatatccagctgaacggtctggttataggtacattgagcaactgactgaaatgcctcaaaatgttctttacgatgccattgggatatatcaacggtggtatatccagtgatttttttctccattttagcttccttagctcctgaaaatctcgataactcaaaaaatacgcccggtagtgatcttatttcattatggtgaaagttggaacctcttacgtgccaagccaaataggccgt

SEQ ID NO: 317 - DNA, 7902 bp, Artificial
  Synthetic
tcagatccttccgtatttagccagtatgttctctagtgtggttcgttgtttttgcgtgagccatgagaacgaaccattgagatcatgcttactttgcatgtcactcaaaaattttgcctcaaaactggtgagctgaatttttgcagttaaagcatcgtgtagtgtttttcttagtccgttacgtaggtaggaatctgatgtaatggttgttggtattttgtcaccattcatttttatctggttgttctcaagttcggttacgagatccatttgtctatctagttcaacttggaaaatcaacgtatcagtcgggcggcctcgcttatcaaccaccaatttcatattgctgtaagtgtttaaatctttacttattggtttcaaaacccattggttaagccttttaaactcatggtagttattttcaagcattaacatgaacttaaattcatcaaggctaatctctatatttgccttgtgagttttcttttgtgttagttcttttaataaccactcataaatcctcatagagtatttgttttcaaaagacttaacatgttccagattatattttatgaatttttttaactggaaaagataaggcaatatctcttcactaaaaactaattctaatttttcgcttgagaacttggcatagtttgtccactggaaaatctcaaagcctttaaccaaaggattcctgatttccacagttctcgtcatcagctctctggttgctttagctaatacaccataagcattttccctactgatgttcatcatctgagcgtattggttataagtgaacgataccgtccgttctttccttgtagggttttcaatcgtggggttgagtagtgccacacagcataaaattagcttggtttcatgctccgttaagtcatagcgactaatcgctagttcatttgctttgaaaacaactaattcagacatacatctcaattggtctaggtgattttaatcactataccaattgagatgggctagtcaatgataattactagtccttttcctttgagttgtgggtatctgtaaattctgctagacctttgctggaaaacttgtaaattctgctagaccctctgtaaattccgctagacctttgtgtgttttttttgtttatattcaagtggttataatttatagaataaagaaagaataaaaaaagataaaaagaatagatcccagccctgtgtataactcactactttagtcagttccgcagtattacaaaaggatgtcgcaaacgctgtttgctcctctacaaaacagaccttaaaaccctaaaggcttaagtagcaccctcgcaagctcgggcaaatcgctgaatattccttttgtctccgaccatcaggcacctgagtcgctgtctttttcgtgacattcagttcgctgcgctcacggctctggcagtgaatgggggtaaatggcactacaggcgccttttatggattcatgcaaggaaactacccataatacaagaaaagcccgtcacgggcttctcagggcgttttatggcgggtctgctatgtggtgctatctgactttttgctgttcagcagttcctgccctctgattttccagtctgaccacttcggattatcccgtgacaggtcattcagactggctaatgcacccagtaaggcagcggtatcatcaacaggcttacccgtcttactgtcaagaggacatccggtcaaataaaacgaaaggctcagtcgaaagactgggcctttcgttttgctgaggagacttagggaccctttatgacaacttgacggctacatcattcactttttcttcacaaccggcacggaactcgctcgggctggccccggtgcattttttaaatacccgcgagaaatagagttgatcgtcaaaaccaacattgcgaccgacggtggcgataggcatccgggtggtgctcaaaagcagcttcgcctggctgatacgttggtcctcgcgccagcttaagacgctaatccctaactgctggcggaaaagatgtgacagacgcgacggcgacaagcaaacatgctgtgcgacgctggcgatatcaaaattgctgtctgccaggtgatcgctgatgtactgacaagcctcgcgtacccgattatccatcggtggatggagcgactcgttaatcgcttccatgcgccgcagtaacaattgctcaagcagatttatcgccagcagctccgaatagcgcccttccccttgcccggcgttaatgatttgcccaaacaggtcgctgaaatgcggctggtgcgcttcatccgggcgaaagaaccccgtattggcaaatattgacggccagttaagccattcatgccagtaggcgcgcggacgaaagtaaacccactggtgataccattcgcgagcctccggatgacgaccgtagtgatgaatctctcctggcgggaacagcaaaatatcacccggtcggcaaacaaattctcgtccctgatttttcaccaccccctgaccgcgaatggtgagattgagaatataacctttcattcccagcggtcggtcgataaaaaaatcgagataaccgttggcctcaatcggcgttaaacccgccaccagatgggcattaaacgagtatcccggcagcaggggatcattttgcgcttcagccatacttttcatactcccaccattcagagaagaaaccaattgtccatattgcatcagacattgccgtcactgcgtcttttactggctcttctcgctaacccaaccggtaaccccgcttattaaaagcattctgtaacaaagcgggaccaaagccatgacaaaaacgcgtaacaaaagtgtctataatcacggcagaaaagtccacattgattatttgcacggcgtcacactttgctatgccatagcatttttatccataagattagcggatcctacctgacgctttttatcgcaactctctactgtttctccatacccgttttacctgcaggtgcagttgatgctcggttttggagtagggcaatgattcaaaccgaaactatgctcgacgtagcagacaacagtggtgctcgccgcgtacaatgtattaaagtacttggtggttcacatcgtcgttatgcttctgttggcgacattattaaagttactgtaaaagaagcaatcccacgcgcacgtgttaaaaaaggtgacgtgatgaatgcggttgtagttcgtactaaattcggcattcgtcgtccagatggttctgtgatccgttttgatgataatgctgcagttattttgaacaacaacaaagctccgattgctactcgtatcttcggaccagtgactcgtgaacttcgtactgaacagttcatgaaaatcatttcattggctcctgaagttctataagaggcaatcatggctaagattaaaaaaggcgatcaagttatcgtgatcgcaggtaaagaaaaaggcaaacagggtactgtgttgtctgtttctgaagaccgcgttaaggttgaaggccttaacttagtgaagaagcatcaaaagcctaaccgtgtaactggcgctgaaggcggtgtagttactcaagaagcttcgcttcatatttcaaacgtggcaattttaaatgctacaacccagaaggctgaccgtgttggttaccaagtgattgatggcgtgaaaactcgcgtttataaatcaaatggtgaatcagtggcggtagcgaagtaataggttgaaaaggcaatggccagacttaaagcacgttacaacgatgaacttaaagcaaagttaaaagaagaacttggcattaagaacgtgatggaaattccacgcatcacaaaaattaccctaaacatgggtgtaggcgcagctgcaactgataagaaattattagatggcgctgtagtcgacatgcaattaattgctggtcaaaaaccagtaattacacttgctcgtaaatctatcgcaggtttcaaaatccgtgatggttggccaattggttgtaaagttactttacgtggcgaccaaatgtacgaattcttggaccgtttgatctctatcgcaatccctcgtatccgtgacttccgtggtttctcttcgaaatcatttgatggtcgtggtaactactcaatgggtttgaaagagcaaatcgttttccctgaaatcgatttcgataagattgatcgtattcgtggtatggatattaccattactacgactgctcgcaccgatgacgaaggccgtgcgcttatgcgtgcattcggcttcccgttcaaataagaggtcgatatggctaagaaaggtatgattaatcgcgaattgaaacgcgaaaaaacagttgctaaatacgctgcaaaacgtgctgaattaaaagctacaattgcaaacgtaaacgcaagtgaagaagagcgtttcgaagcgatgttaaagttacaagcattgccacgtaatgcatctccggtacgtcttcgtaaccgttgtggtttaactggtcgtcctcatggttacttccgtaagttcggtttaagccgtaacaaattacgtgacacagtaatgcagggtgatgtaccaggcgttgttaaggcaagctggtaaggagcgactaaatgagtatgcaagataccgttgccgacatgctaacacgtgttcgtaacgcacaaatggctaagaaacaaacagtttctatgccttcttctaagttgaaagttgcaattgcaaacgtacttcaacaagaaggttatatttcaaatgtagaagttgctcaagaagagacaaaatctactttgacaattactttaaaatatttcgaaggcaaaccagttatcgaaatggttaagcgcgtaagccgtccaggtcttcgccaataccgtggtaaagataaacttccaagcgttaagcaaggtttaggtattgcaattgtttctacaagcaaaggcatcatgactgatcgcgctgcacgtgctgcaggcgttggtggtgaagttattgcttttgtttcttaataggtgattcctcatgtctcgtgtggctaaagccccagtaactgtacctaatggtgtagcagttactcagaacggccggcaggtcgaagtgaaaggcagcaaaggtacattgtctttcaacctgcatgcgctggtcgagctaaaacaggaagaaggtaaacttcaacttgctccagttaaagaatcgaaagatgcttggatgcaagctggtactgctcgcgctgtattgaacaaccttgtaaaaggtgttagcgaaggcttcgaacgtaagttacagctagttggtgttggttataaagctgcggttaaaggtactgttgtaaaccttaaccttggttattcacacccaattgactacgctttaccagaaggtgtaacagcggaaactccaactgcaactgaaatcattttgaaatcagcaaacaagcagttgttaggtcaagtagcggcagaaatccgtgcgtaccgtgctcctgaaccatataaaggtaaaggtgttcgttattcggatgaagtcattcttcgtaaagaagctaagaagaaataaggcgcgaggttcttatgaacgaaaagaaacaatcccgtttgcgtcgtgcgaaaagcacacgcttgcacattcgtgcattgggtgcgactcgtttgtgtgtaaaccgcactccgcgtcacatctatgctcaagttatttcagcagatggtggcaaagttttagcgcaagcttcaactttggatgcatctttacgtagcggtactacaggtaatgtagatgcagctactaaagtaggtgctttaatcgcagagcgcgcgaaagcagctggtgtaactaaagttgcatttgaccgttctggttttaaatatcatggtcgtatcaaagccttggctgatgctgctcgtgaaaacggcttggagttctaatcatggctaaagttgaacaaaacgaaggtcttgttgaaaagctggttgccgttgatcgtgtagccaaagttgttaagggcggtcgtatcttctctttcacagcattaactgttgtgggtgatggtaatggtcgtgttggttttggtcgtggtaaagcacgtgaagttcctgctgctatttctaaagcacttgaagctgctcgtcgcaacatgatcactgtagaccttgctggtactactttacaacaccctgtgaatgctcgtcatggtgcaagccgtgtatacatgcaacctgcttcagaaggtactggcgtaatcgctggtggtgcaatgcgtgccgttcttgaagctgcaggtgtacataacgtacttgctaaatgttatggttctacaaatgctgctaacgtagtaaacgcaacttttaaaggtttgcgtgatatgacttctcctgagaaagtcgctgcgaaacgtggtaaatcagtagaagaaattcaagggtaatcaatcatgaaaacgattaaagttacccagactaaatcttcttcacatcgcttgaaaaatcacaagctttgcttacaaggtttaggtctgcgtcgtattggtcatactgtagaagtgcaagatacgccttctaaccgtggtatgatcaacaaagtctactatatggttagtgtagaggaataagccatgactctgcgtttaaatgagcttgcacctgcagaaggtgcaaaacgtgaacaccgtcgtttaggccgtggtatcggttctggcgttggtaagactggtggccgtggtgtcaaaggtcaaaaatcacgtaaaagtggtggcgttcgtccaggtttcgaaggcggtcaaacagcgatttatcgtcgtttacctaaattcggtttcactagccaaatcgctttaaaaactgctgaagtacgtttgtctgagttaactaaagtggaaggcgacattgttagccttgaaactttaaaagctgcgaatgttgttcgtcgcgatcaaattcgtgctcgtatcgtgctttctggtgaaatcactcgtgcattcactgttcaaggtgttgcattgactaaaggcgctaaagctgcaattgaagcagctggcggtaaagtcgaggagtaatctcgagtgtctatgtctcctagttacttaattaacggcactcctcagccaagtcaaaagcctccggtcggaggcttttgactacatgcccatggcgtttacgccccgccctgccactcatcgcagtactgttgtaattcattaagcattctgccgacatggaagccatcacaaacggcatgatgaacctgaatcgccagcggcatcagcaccttgtcgccttgcgtataatatttgcccatagtgaaaacgggggcgaagaagttgtccatattggccacgtttaaatcaaaactggtgaaactcacccagggattggctgagacgaaaaacatattctcaataaaccctttagggaaataggccaggttttcaccgtaacacgccacatcttgcgaatatatgtgtagaaactgccggaaatcgtcgtggtattcactccagagcgatgaaaacgtttcagtttgctcatggaaaacggtgtaacaagggtgaacactatcccatatcaccagctcaccgtctttcattgccatacggaactccggatgagcattcatcaggcgggcaagaatgtgaataaaggccggataaaacttgtgcttatttttctttacggtctttaaaaaggccgtaatatccagctgaacggtctggttataggtacattgagcaactgactgaaatgcctcaaaatgttctttacgatgccattgggatatatcaacggtggtatatccagtgatttttttctccattttagcttccttagctcctgaaaatctcgataactcaaaaaatacgcccggtagtgatcttatttcattatggtgaaagttggaacctcttacgtgccaagccaaataggccgt

SEQ ID NO: 318 - DNA, 6939 bp, Artificial
  Synthetic
tcagatccttccgtatttagccagtatgttctctagtgtggttcgttgtttttgcgtgagccatgagaacgaaccattgagatcatgcttactttgcatgtcactcaaaaattttgcctcaaaactggtgagctgaatttttgcagttaaagcatcgtgtagtgtttttcttagtccgttacgtaggtaggaatctgatgtaatggttgttggtattttgtcaccattcatttttatctggttgttctcaagttcggttacgagatccatttgtctatctagttcaacttggaaaatcaacgtatcagtcgggcggcctcgcttatcaaccaccaatttcatattgctgtaagtgtttaaatctttacttattggtttcaaaacccattggttaagccttttaaactcatggtagttattttcaagcattaacatgaacttaaattcatcaaggctaatctctatatttgccttgtgagttttcttttgtgttagttcttttaataaccactcataaatcctcatagagtatttgttttcaaaagacttaacatgttccagattatattttatgaatttttttaactggaaaagataaggcaatatctcttcactaaaaactaattctaatttttcgcttgagaacttggcatagtttgtccactggaaaatctcaaagcctttaaccaaaggattcctgatttccacagttctcgtcatcagctctctggttgctttagctaatacaccataagcattttccctactgatgttcatcatctgagcgtattggttataagtgaacgataccgtccgttctttccttgtagggttttcaatcgtggggttgagtagtgccacacagcataaaattagcttggtttcatgctccgttaagtcatagcgactaatcgctagttcatttgctttgaaaacaactaattcagacatacatctcaattggtctaggtgattttaatcactataccaattgagatgggctagtcaatgataattactagtccttttcctttgagttgtgggtatctgtaaattctgctagacctttgctggaaaacttgtaaattctgctagaccctctgtaaattccgctagacctttgtgtgttttttttgtttatattcaagtggttataatttatagaataaagaaagaataaaaaaagataaaaagaatagatcccagccctgtgtataactcactactttagtcagttccgcagtattacaaaaggatgtcgcaaacgctgtttgctcctctacaaaacagaccttaaaaccctaaaggcttaagtagcaccctcgcaagctcgggcaaatcgctgaatattccttttgtctccgaccatcaggcacctgagtcgctgtctttttcgtgacattcagttcgctgcgctcacggctctggcagtgaatgggggtaaatggcactacaggcgccttttatggattcatgcaaggaaactacccataatacaagaaaagcccgtcacgggcttctcagggcgttttatggcgggtctgctatgtggtgctatctgactttttgctgttcagcagttcctgccctctgattttccagtctgaccacttcggattatcccgtgacaggtcattcagactggctaatgcacccagtaaggcagcggtatcatcaacaggcttacccgtcttactgtcaagaggacatccggtcaaataaaacgaaaggctcagtcgaaagactgggcctttcgttttgctgaggagacttagggaccctttatgacaacttgacggctacatcattcactttttcttcacaaccggcacggaactcgctcgggctggccccggtgcattttttaaatacccgcgagaaatagagttgatcgtcaaaaccaacattgcgaccgacggtggcgataggcatccgggtggtgctcaaaagcagcttcgcctggctgatacgttggtcctcgcgccagcttaagacgctaatccctaactgctggcggaaaagatgtgacagacgcgacggcgacaagcaaacatgctgtgcgacgctggcgatatcaaaattgctgtctgccaggtgatcgctgatgtactgacaagcctcgcgtacccgattatccatcggtggatggagcgactcgttaatcgcttccatgcgccgcagtaacaattgctcaagcagatttatcgccagcagctccgaatagcgcccttccccttgcccggcgttaatgatttgcccaaacaggtcgctgaaatgcggctggtgcgcttcatccgggcgaaagaaccccgtattggcaaatattgacggccagttaagccattcatgccagtaggcgcgcggacgaaagtaaacccactggtgataccattcgcgagcctccggatgacgaccgtagtgatgaatctctcctggcgggaacagcaaaatatcacccggtcggcaaacaaattctcgtccctgatttttcaccaccccctgaccgcgaatggtgagattgagaatataacctttcattcccagcggtcggtcgataaaaaaatcgagataaccgttggcctcaatcggcgttaaacccgccaccagatgggcattaaacgagtatcccggcagcaggggatcattttgcgcttcagccatacttttcatactcccaccattcagagaagaaaccaattgtccatattgcatcagacattgccgtcactgcgtcttttactggctcttctcgctaacccaaccggtaaccccgcttattaaaagcattctgtaacaaagcgggaccaaagccatgacaaaaacgcgtaacaaaagtgtctataatcacggcagaaaagtccacattgattatttgcacggcgtcacactttgctatgccatagcatttttatccataagattagcggatcctacctgacgctttttatcgcaactctctactgtttctccatacccgttttacctgcaggtgcagtgataagcgcacttagaggtttcatcatgaaagtacaagcttctgtaaagaaaatttgtggtagctgtaaagttatccgtcgtaatggggttattcgcgtgatttgtagcgcagaacctcgtcataagcagcgtcaaggttaatctaatcaagacctgttgatttcagtaggcgaattgggttaatatccgcccctcaagatttttgtggggcggttgattatctctactgcctttttggagaaaagtgaatggctcgtattgccggtgtaaacattccggataacaagcatgctgttatctccctcacttacatctttggtatcggtcgccacactgctaagaatatcttagctacagttggtattactgagactactaagatccgtgagttggacgatgctcagcttgatgcgattcgtgcagaagttgctaaggttcctaccgaaggtgacttacgtcgcgaaatttccatgaacattaaacgtttaatggatttaggttgctatcgtggccttcgtcatcgtcgcagcttgcctgtccgtggtcaacgcaccaaaactaacgcacgtacccgtaaaggtccgcgcaaaccgattaaaaagtaagatttctggaagctaaaagatggctaaagatactcgcacacgcaagaaggtcactcgtaccgtctctgaaggtgttgcacacattcacgcgtcttttaataacaccattgttacgattaccgatcgtcaaggtaatgcattggcttgggccacctcaggtggacaaggcttccgtggttcacgtaaatcaactccgtttgctgctcaggtagctgctgaagttgctggtaaagcagctttagattacggtttgaaaaaccttgacgtccttgtaaaaggtcctggtccaggtcgtgagtctgcggttcgtgcattaggcgcagtgggttataagattaacagcattaccgatgtgactccaattcctcacaacggttgccgtccacctaaaaaacgtcgcgtgtaaggagaaacattcatggctcgttatattggtccaaaatgcaaactctctcgccgcgaagggacagacctgcaacttaaatctggcgttaaaccatttgacgtcaaaactaaaaaagctaacaaagcacctggtcaacacggtcaggctcgcggtggtaagcaatctgagtattcactacaattacgtgaaaaacaaaaagtccgtcgtatttacggtgtgttagagcgtcaatttagtaactactataaagaagcagctcgtgtaaaaggcgcaactggtgagaacttgttgaaattgcttgaaagccgtcttgataacgttgtttatcgcatgggttttggttctacacgtgcagaagctcgtcagttagtaagtcaccgtagcattactttgaatggtcgtcgtgtaaacatcgcatctattcaagttaaagcgggtgatgtaattgcggttcacgaaggtgctaaacaacaattgcgtatcaaaaacgcgattgaattagctgctcaacgtggtattccagcttggattgatgttgatcattctaaacttgaaggtacgtttaaagctgcaccagatcgttctgatttacctgctgaaatcaacgaaagcttgattgtagaattgtattctaaataatccttgaggtagcaataatgacgcgtactgcaaacgagtttctcactccgcaagcgatcaaggtcgaagcggtaagcgggacctcggcaaaagtgattctagaacctttagagcgtggttttggccatactctaggtaatgctttacgtcgcattctattgtcttctttacctggcgctgctgtggttgaagtagagatagaaggtgtcgagcacgagtacagtactttagaaggcttgcagcaggacatcgtcgagctcttgctgaacctaaaaggattgtctattaagctgttcgatcaaaatgaagcttatttaacattagaaaaacaaggtcctggcgatattactgctgccgaccttcgtttacctcataatgttgaagtggttaacccagatcatttaatcggtactttgagtgcttcaggttcattaaaaatgcgcttgaaagttgctcaaggtcgtggttatgaaacttctgattctcgtttccctgaaggtgaaacacgtcctgtaggtcgtttgcaattagatgcttcttatagcccaattaaacgtgtttcttacaccgttgaaaatgcgcgtgttgaacaacgtaccgatttagataagctggtaatcgaccttgaaacaaatggaacggttgatcctgaagaagcaatccgtaaagcggcaacaatcttgcaacaacaaattgcaatttttgttgatcttcagaaagaccaaactccagttgctcaagagcctcgtgaagaagttgacccaatcttgcttcgcccagtagatgatctagagcttactgttcgttctgctaactgtttgaaagcagaaaatatttactacattggtgatctcgttcaacgtactgaagttgagttgttaaaaactcctaaccttggtaaaaaatcgttaacagagatcaaagatgttttggcatcgaaaggcttacaactcggtatgcgtcttgaaaactggccaccagctagtcttcgtatggacgaccgttttgcctatcgtagccgttaattaagtaggactatcaccatgcgtcatcgtaatagtggtgtgaaattaggccgtacaagcagccatcgtaaagcgatgttccaaaacttggctaattctttatttgaacacgagttgatcaaaacaactgttcctaaagctaaagaattacgtcgtgttgctgagcctttaatcactctagcaaaaaacgatactgtagcaaatcgtcgtttagcatttgctcgtactcgtaatgctgcaactgttggtaaattatttaccgtactcggccctcgttacaaagaacgtaacggcggttatctacgtgttcttaaagcgggcttccgtgctggtgatgcagcaccgatggcttacgttgagcttgtagatcgtgaagtgaacacttcagctgaataattgatattattcggaaaaggccggacttaattaacggcactcctcagccaagtcaaaagcctccggtcggaggcttttgactacatgcccatggcgtttacgccccgccctgccactcatcgcagtactgttgtaattcattaagcattctgccgacatggaagccatcacaaacggcatgatgaacctgaatcgccagcggcatcagcaccttgtcgccttgcgtataatatttgcccatagtgaaaacgggggcgaagaagttgtccatattggccacgtttaaatcaaaactggtgaaactcacccagggattggctgagacgaaaaacatattctcaataaaccctttagggaaataggccaggttttcaccgtaacacgccacatcttgcgaatatatgtgtagaaactgccggaaatcgtcgtggtattcactccagagcgatgaaaacgtttcagtttgctcatggaaaacggtgtaacaagggtgaacactatcccatatcaccagctcaccgtctttcattgccatacggaactccggatgagcattcatcaggcgggcaagaatgtgaataaaggccggataaaacttgtgcttatttttctttacggtctttaaaaaggccgtaatatccagctgaacggtctggttataggtacattgagcaactgactgaaatgcctcaaaatgttctttacgatgccattgggatatatcaacggtggtatatccagtgatttttttctccattttagcttccttagctcctgaaaatctcgataactcaaaaaatacgcccggtagtgatcttatttcattatggtgaaagttggaacctcttacgtgccaagccaaataggccgt

SEQ ID NO: 319 - DNA, 8500 bp, Artificial
  Synthetic
tcagatccttccgtatttagccagtatgttctctagtgtggttcgttgtttttgcgtgagccatgagaacgaaccattgagatcatgcttactttgcatgtcactcaaaaattttgcctcaaaactggtgagctgaatttttgcagttaaagcatcgtgtagtgtttttcttagtccgttacgtaggtaggaatctgatgtaatggttgttggtattttgtcaccattcatttttatctggttgttctcaagttcggttacgagatccatttgtctatctagttcaacttggaaaatcaacgtatcagtcgggcggcctcgcttatcaaccaccaatttcatattgctgtaagtgtttaaatctttacttattggtttcaaaacccattggttaagccttttaaactcatggtagttattttcaagcattaacatgaacttaaattcatcaaggctaatctctatatttgccttgtgagttttcttttgtgttagttcttttaataaccactcataaatcctcatagagtatttgttttcaaaagacttaacatgttccagattatattttatgaatttttttaactggaaaagataaggcaatatctcttcactaaaaactaattctaatttttcgcttgagaacttggcatagtttgtccactggaaaatctcaaagcctttaaccaaaggattcctgatttccacagttctcgtcatcagctctctggttgctttagctaatacaccataagcattttccctactgatgttcatcatctgagcgtattggttataagtgaacgataccgtccgttctttccttgtagggttttcaatcgtggggttgagtagtgccacacagcataaaattagcttggtttcatgctccgttaagtcatagcgactaatcgctagttcatttgctttgaaaacaactaattcagacatacatctcaattggtctaggtgattttaatcactataccaattgagatgggctagtcaatgataattactagtccttttcctttgagttgtgggtatctgtaaattctgctagacctttgctggaaaacttgtaaattctgctagaccctctgtaaattccgctagacctttgtgtgttttttttgtttatattcaagtggttataatttatagaataaagaaagaataaaaaaagataaaaagaatagatcccagccctgtgtataactcactactttagtcagttccgcagtattacaaaaggatgtcgcaaacgctgtttgctcctctacaaaacagaccttaaaaccctaaaggcttaagtagcaccctcgcaagctcgggcaaatcgctgaatattccttttgtctccgaccatcaggcacctgagtcgctgtctttttcgtgacattcagttcgctgcgctcacggctctggcagtgaatgggggtaaatggcactacaggcgccttttatggattcatgcaaggaaactacccataatacaagaaaagcccgtcacgggcttctcagggcgttttatggcgggtctgctatgtggtgctatctgactttttgctgttcagcagttcctgccctctgattttccagtctgaccacttcggattatcccgtgacaggtcattcagactggctaatgcccccagtaaggcagcggtatcatcaacaggcttacccgtcttactgtcaagaggacatccggtcaaataaaacgaaaggctcagtcgaaagactgggcctttcgttttgctgaggagacttagggaccctttatgacaacttgacggctacatcattcactttttcttcacaaccggcacggaactcgctcgggctggccccggtgcattttttaaatacccgcgagaaatagagttgatcgtcaaaaccaacattgcgaccgacggtggcgataggcatccgggtggtgctcaaaagcagcttcgcctggctgatacgttggtcctcgcgccagcttaagacgctaatccctaactgctggcggaaaagatgtgacagacgcgacggcgacaagcaaacatgctgtgcgacgctggcgatatcaaaattgctgtctgccaggtgatcgctgatgtactgacaagcctcgcgtacccgattatccatcggtggatggagcgactcgttaatcgcttccatgcgccgcagtaacaattgctcaagcagatttatcgccagcagctccgaatagcgcccttccccttgcccggcgttaatgatttgcccaaacaggtcgctgaaatgcggctggtgcgcttcatccgggcgaaagaaccccgtattggcaaatattgacggccagttaagccattcatgccagtaggcgcgcggacgaaagtaaacccactggtgataccattcgcgagcctccggatgacgaccgtagtgatgaatctctcctggcgggaacagcaaaatatcacccggtcggcaaacaaattctcgtccctgatttttcaccaccccctgaccgcgaatggtgagattgagaatataacctttcattcccagcggtcggtcgataaaaaaatcgagataaccgttggcctcaatcggcgttaaacccgccaccagatgggcattaaacgagtatcccggcagcaggggatcattttgcgcttcagccatacttttcatactcccaccattcagagaagaaaccaattgtccatattgcatcagacattgccgtcactgcgtcttttactggctcttctcgctaacccaaccggtaaccccgcttattaaaagcattctgtaacaaagcgggaccaaagccatgacaaaaacgcgtaacaaaagtgtctataatcacggcagaaaagtccacattgattatttgcacggcgtcacactttgctatgccatagcatttttatccataagattagcggatcctacctgacgctttttatcgcaactctctactgtttctccatacccgttttacctgcaggtgcagttttttaataacgggagaattgccatatggcaacaacgaatcagttgatccgtaagggtcgtacgactttggttgaaaaatccaaagttcctgcgttgaaggcttgtccacaacgtcgtggtgtttgtacacgtgtttatacaactacacctaaaaaacctaactcagctatgcgtaaggtttgccgtgttcgcttaacttcaggttttgaagtatctagctacatcggtggtgaaggtcataacttacaagagcacagtgttgttcttatccgtggtggtcgtgttaaagacttaccaggtgtacgttaccataccgttcgtggttctttagactgtgccggcgttaaagatcgtaatcaatcacgttctaaatacggtactaagcgtcctaagaagtaattctaggaaactagtccaaaagccctttagcgtttcgcttgtttgaattcttcatagatttgtaattcaagcgacgtatagtaaggccagcgtcgtgtacatgacacttgtacaaactgctggattatcctgaagtgtcatattattaggtgtattaaaatgccaagacgtcgcgtagtcgctgctcgtgagatccttccagatccaaaatttagcagccaaacaatcgctaaattcatgaaccacgtaatgcaagatggtaaaaaatctattgctgaaagtatcgtttacggtgctttagaacgcgttcaagaaaaaaacaaagtagacccagttgaatttttcgagactactcttgagaaagttcgtcctatggtcgaagtaaaagcacgccgtgttggtggtgctacttatcaagtacctatggaagtacgcccatcccgtcgtactgccttagcaatgcgttggttagtagatgctgctgctaagcgttctgaaaaaactatggctttacgtcttgctggcgagttgcttgatgcagctgaaggcaaaggtgccgcgatcaaaaaacgtgaagacgtgcatcgtatggcagaagctaacaaagccttctctcactaccgtttctaagcggataaaacagtccctaatcaggagaatactcatgcatacagtagctagattcaacattgctctctaccaaagtgggggctttgcgggtatttaagttgccccgtttgagtattcgtgcgcatcaatttaattgatgcgccctgttttaaagataacatttaggaatgtagacatcatggctcgccaaaccccaattactcgttaccgtaacatcggtatctctgcgcacattgacgcaggtaaaacaactacaactgaacgtattttgttctacacaggtgtatctcacaaaattggtgaagtacacgacggtgcagcaacaatggactggatggaacaagagcaagagcgtggtattacaattacctctgctgctacaacttgtttctggtctggtatggctaaccaattccaacaacaccgtatcaacgtaattgatacaccgggacacgtagacttcacaattgaagttgaacgttctatgcgtgttcttgacggtgcgtgcatggtttactgtgcagttggtggtgtacagcctcagtctgaaactgtatggcgtcaagcaaacaaatataaagtgcctcgtttagcattcgtgaacaagatggaccgtactggtgcaaacttcttccgtgttgttgaacaaatgaaaacacgtttgggcggtaaccctgtgccaatcgttgtgccaatcggtgctgaagacacattccaaggtgttgttgaccttatcgaaatgaaggcaatcatctgggatgaagcttctcaaggtatgaagtttgaatacggtgatattcctgctgacctagttgatactgctcaagaatggcgtactaacatggttgaagcagctgctgaagcttctgaagaattaatggacaagtacctagaagaaggtgatctttctaaagaagacatcatcgctggtttacgtgctcgtacattagcttctgaaattcaagtaatgctttgtggttctgcgttcaaaaacaaaggtgttcaacgtatgttggacgctgtaattgaattcttaccatcacctacagaagttaaagcgatcgaaggtatccttgacgataaagacgaaactaaagcgtctcgtgaagcatctgacgaagctccgttctctgcacttgcgttcaaaatcatgaacgacaaattcgtaggtaacttaacattcgtacgtgtttactctggtgttcttaaacaaggtgatccggtttataacccagttaaagctaagcgtgaacgtatcggtcgtatcgtgcaaatgcacgcgaacgagcgtcaagatcttgatgaaatccgtgcaggtgatatcgcagcgtgtgtaggtcttaaagacgttacaactggtgatacattatgtgatgagaaaaacatcattactcttgagcgtatggaattcccagagccagtaatttcattggctgtagaaccaaaaactaaagcagaccaagaaaaaatgtctatcgctttaggccgtttggcgaaagaagatccatcgttccgtgttcgtactgatgaagaatctggtcaaacaattattgctggtatgggtgagcttcaccttgacatcatcgttgaccgtatgaagcgtgaattcggtgttgaagcgaatatcggtaaaccaatggttgcttatcgtgaaacgattaagaaaactgttgagcaagaaggtaaattcgtacgtcaaacaggtggtaaaggtaagttcggtcacgtatatgttcgtttagaaccgcttgacgttgaaactgctggtaaagaatacgaattcgctgaagaagttgttggtggtgtagtacctaaagaattcttcggtgcagttgataaaggtattcaagaacgtatgaagaatggtgtcttggctggttacccagttgtaggcgttaaagctgttcttttcgacggttcttaccacgatgtcgactctgacgaattatcgttcaaaatggctggttcttatgccttccgtgatggtttcatgaaagcggatcctatccttcttgaacctatcatgaaagttgaagtagaaactccagaagactacatgggcgatatcatgggtgacttaaaccgtcgtcgtggtatggttcaaggtatggacgatcttcctggtggaacaaaagcaattaaagcagaagttcctcttgctgagatgtttggttacgcgactcaaatgcgttctatgtctcaaggtcgtgcgacttactcaatggaatttgctaaatatgctgaaactccacgtaacgtggctgaaggcatcattgctaaattccaagctggcggtaaaaaaggtgacgacgagtaatctttcgattactataagccctaactaattcttagttgaaaaccaagtgctcatggggtgaccctccatgagtagttaataaaggaagatcatcatggctaaagccaagtttgaacgtaataaaccacacgtaaacgtgggtacaatcggtcacgttgaccatggtaaaacaactttaactgctgcgattgcaactatttgtgcaaaaacttacggcggtgaagcgaaagattactcgcaaatcgactcagcacctgaagaaaaagcacgtggtattacaattaatacttcacacgtagaatacgattctccaattcgtcactacgcacacgttgactgcccgggccacgccgattacgttaaaaacatgatcactggtgctgctcagatggacggcgcgatccttgtatgtgctgcgactgacggtccaatgccacaaactcgtgaacacatccttctttctcgtcaggttggtgtaccttacatcatcgtattcttgaacaaatgcgaccttgttgacgacgaagaattacttgaattagtagaaatggaagttcgtgaacttctttctacttacgacttcccaggtgatgacactccagtaatccgtggttcagctcttgctgctcttaacggtgaagcaggtccttacggtgaagaatcagttcttgctcttgtagcagctcttgactcttacatcccagaaccagaacgtgctatcgacaaagcattcttaatgccaatcgaagacgtattctcaatttctggtcgtggtacagtagtaacaggccgtgtagaatctggtatcgttaaagttggtgaagaagtagagatcgttggtattaaagatacagttaaaacaactgtaactggcgtagaaatgttccgtaaacttcttgacgaaggccgtgcaggcgagaactgtggtgtattacttcgtggtactaagcgtgaagacgtacaacgtggtcaagtacttgctaaaccaggtacaatcaagccgcacactaaattcgacgcagaagtatatgtactttctaaagaagaaggtggtcgtcacactccattcttaaatggttaccgtccacagttctacttccgtacaactgacgtaactggtgcgatccagttgaaagaaggcgttgaaatggtaatgccaggtgacaacgttgaaatgtcagtagaattaatccacccaatcgcaatggacccaggtctacgttttgcgatccgagaaggtggtcgtactgtaggtgctggtgttgttgcgaaagtaactgcataatcacttttcagtgaaaaaagcgctcacttaattaacggcactcctcagccaagtcaaaagcctccggtcggaggcttttgactacatgcccatggcgtttacgccccgccctgccactcatcgcagtactgttgtaattcattaagcattctgccgacatggaagccatcacaaacggcatgatgaacctgaatcgccagcggcatcagcaccttgtcgccttgcgtataatatttgcccatagtgaaaacgggggcgaagaagttgtccatattggccacgtttaaatcaaaactggtgaaactcacccagggattggctgagacgaaaaacatattctcaataaaccctttagggaaataggccaggttttcaccgtaacacgccacatcttgcgaatatatgtgtagaaactgccggaaatcgtcgtggtattcactccagagcgatgaaaacgtttcagtttgctcatggaaaacggtgtaacaagggtgaacactatcccatatcaccagctcaccgtctttcattgccatacggaactccggatgagcattcatcaggcgggcaagaatgtgaataaaggccggataaaacttgtgcttatttttctttacggtctttaaaaaggccgtaatatccagctgaacggtctggttataggtacattgagcaactgactgaaatgcctcaaaatgttctttacgatgccattgggatatatcaacggtggtatatccagtgatttttttctccattttagcttccttagctcctgaaaatctcgataactcaaaaaatacgcccggtagtgatcttatttcattatggtgaaagttggaacctcttacgtgccaagccaaataggccgt

SEQ ID NO: 320 - DNA, 8754 bp, Artificial
  Synthetic
tcagatccttccgtatttagccagtatgttctctagtgtggttcgttgtttttgcgtgagccatgagaacgaaccattgagatcatgcttactttgcatgtcactcaaaaattttgcctcaaaactggtgagctgaatttttgcagttaaagcatcgtgtagtgtttttcttagtccgttacgtaggtaggaatctgatgtaatggttgttggtattttgtcaccattcatttttatctggttgttctcaagttcggttacgagatccatttgtctatctagttcaacttggaaaatcaacgtatcagtcgggcggcctcgcttatcaaccaccaatttcatattgctgtaagtgtttaaatctttacttattggtttcaaaacccattggttaagccttttaaactcatggtagttattttcaagcattaacatgaacttaaattcatcaaggctaatctctatatttgccttgtgagttttcttttgtgttagttcttttaataaccactcataaatcctcatagagtatttgttttcaaaagacttaacatgttccagattatattttatgaatttttttaactggaaaagataaggcaatatctcttcactaaaaactaattctaatttttcgcttgagaacttggcatagtttgtccactggaaaatctcaaagcctttaaccaaaggattcctgatttccacagttctcgtcatcagctctctggttgctttagctaatacaccataagcattttccctactgatgttcatcatctgagcgtattggttataagtgaacgataccgtccgttctttccttgtagggttttcaatcgtggggttgagtagtgccacacagcataaaattagcttggtttcatgctccgttaagtcatagcgactaatcgctagttcatttgctttgaaaacaactaattcagacatacatctcaattggtctaggtgattttaatcactataccaattgagatgggctagtcaatgataattactagtccttttcctttgagttgtgggtatctgtaaattctgctagacctttgctggaaaacttgtaaattctgctagaccctctgtaaattccgctagacctttgtgtgttttttttgtttatattcaagtggttataatttatagaataaagaaagaataaaaaaagataaaaagaatagatcccagccctgtgtataactcactactttagtcagttccgcagtattacaaaaggatgtcgcaaacgctgtttgctcctctacaaaacagaccttaaaaccctaaaggcttaagtagcaccctcgcaagctcgggcaaatcgctgaatattccttttgtctccgaccatcaggcacctgagtcgctgtctttttcgtgacattcagttcgctgcgctcacggctctggcagtgaatgggggtaaatggcactacaggcgccttttatggattcatgcaaggaaactacccataatacaagaaaagcccgtcacgggcttctcagggcgttttatggcgggtctgctatgtggtgctatctgactttttgctgttcagcagttcctgccctctgattttccagtctgaccacttcggattatcccgtgacaggtcattcagactggctaatgcacccagtaaggcagcggtatcatcaacaggcttacccgtcttactgtcaagaggacatccggtcaaataaaacgaaaggctcagtcgaaagactgggcctttcgttttgctgaggagacttagggaccctttatgacaacttgacggctacatcattcactttttcttcacaaccggcacggaactcgctcgggctggccccggtgcattttttaaatacccgcgagaaatagagttgatcgtcaaaaccaacattgcgaccgacggtggcgataggcatccgggtggtgctcaaaagcagcttcgcctggctgatacgttggtcctcgcgccagcttaagacgctaatccctaactgctggcggaaaagatgtgacagacgcgacggcgacaagcaaacatgctgtgcgacgctggcgatatcaaaattgctgtctgccaggtgatcgctgatgtactgacaagcctcgcgtacccgattatccatcggtggatggagcgactcgttaatcgcttccatgcgccgcagtaacaattgctcaagcagatttatcgccagcagctccgaatagcgcccttccccttgcccggcgttaatgatttgcccaaacaggtcgctgaaatgcggctggtgcgcttcatccgggcgaaagaaccccgtattggcaaatattgacggccagttaagccattcatgccagtaggcgcgcggacgaaagtaaacccactggtgataccattcgcgagcctccggatgacgaccgtagtgatgaatctctcctggcgggaacagcaaaatatcacccggtcggcaaacaaattctcgtccctgatttttcaccaccccctgaccgcgaatggtgagattgagaatataacctttcattcccagcggtcggtcgataaaaaaatcgagataaccgttggcctcaatcggcgttaaacccgccaccagatgggcattaaacgagtatcccggcagcaggggatcattttgcgcttcagccatacttttcatactcccaccattcagagaagaaaccaattgtccatattgcatcagacattgccgtcactgcgtcttttactggctcttctcgctaacccaaccggtaaccccgcttattaaaagcattctgtaacaaagcgggaccaaagccatgacaaaaacgcgtaacaaaagtgtctataatcacggcagaaaagtccacattgattatttgcacggcgtcacactttgctatgccatagcatttttatccataagattagcggatcctacctgacgctttttatcgcaactctctactgtttctccatacccgttttacctgcaggtgcagtttcgacgtaaacgaggaagatcatcatggctaaagccaagtttgaacgtaataaaccacacgtaaacgtgggtacaatcggtcacgttgaccatggtaaaacaactttaactgctgcgattgcaactatttgtgcaaaaacttacggcggtgaagcgaaagattactcgcaaatcgactcagcacctgaagaaaaagcacgtggtattacaattaatacttcacacgtagaatacgattctccaattcgtcactacgcacacgttgactgcccgggccacgccgattacgttaaaaacatgatcactggtgctgctcagatggacggcgcgatccttgtatgtgctgcgactgacggtccaatgccacaaactcgtgaacacatccttctttctcgtcaggttggtgtaccttacatcatcgtattcttaaacaaatgcgaccttgttgacgacgaagaattacttgaattagtagaaatggaagttcgtgaacttctttctacttacgacttcccaggtgatgacactccagtaatccgtggttcagctcttgctgctcttaacggtgaagcaggtccttacggtgaagaatcagttcttgctcttgtagcagctcttgactcttacatcccagaaccagaacgtgctatcgacaaagcattcttaatgccaatcgaagacgtattctcaatttctggtcgtggtacagtagtaacaggccgtgtagaatctggtatcgttaaagttggtgaagaagtagagatcgttggtattaaagatacagttaaaacaactgtaactggcgtagaaatgttccgtaaacttcttgacgaaggccgtgcaggcgagaactgtggtgtattacttcgtggtactaagcgtgaagacgtacaacgtggtcaagtacttgctaaaccaggtacaatcaagccgcacactaaattcgacgcagaagtatatgtactttctaaagaagaaggtggtcgtcacactccattcttaaatggttaccgtccacagttctacttccgtacaactgacgtaactggtgcgatccagttgaaagaaggcgttgaaatggtaatgccaggtgacaacgttgaaatgtcagtagaattaatccacccaatcgcaatggacccaggtctacgttttgcgatccgtgaaggtggtcgtactgtaggtgctggtgttgttgcgaaagtaactgcataagcataatatagtgacgtattacgtctcaagttgagagctttggctctcaacttgctttataggtcagtagttcaattggtagagcgtcggtctccaaaaccgaatgttgggggttcgagtccctcctgacctgccatattttgaaataaaaagcttgatgctggcttagttgttcatataataagtcgcgagttctacgacgagtacaaaaatgtcgaatgataaatcgcgtgacgcattgagcgacgcgccaattcctcaaagaaataattctgctgaagttgttcgtactggttcgcctttagatatcgttctatgggtgatagcaattgcattattgctctcggctaccatggtgaatcagcatttaccagcgtattgggcccctgcaaataatgtatgggtgcgcgttggggtaatttttgcttgtatcgttgtggctttaggtttattatacgccacccatcaaggtaaaggcttcgttcgtttgctgaaagatgcacgagtcgaattgcgtcgagtaacttggccaacaaaacaagaaacagtcactacatcgtggcaggttctattggttgtagttgttgcatcgttagtgttatggtgctttgactatggtttgggttggttaattaagttgattatcgggtaaaagagctatgaaacgttggtacattattcatgcctactctggttatgaaaaacaagtgatgcgttcacttacagaacgaatccagcgtagcgctgttgccgatagctttggtgatgtcctagttcctaccgaagaagtggtagaaatgaaggacggtaagaaacgtaaatctgagcgtaaattctttcctggctatgtgttagttgaaatggaaatgaatgatgatacttggcacattgttaaagaatgtccaaaagtattaggttttatcgggggtacacctgaaaaacctgcgccaatcactcaacgtgaagcagatgcgattcttgcgcgtgtacgtaatactggtgaagctccacgtcctaagacgatgtttgaaccaggtgaagaattactcgttattgacggtccattcacagactttaaaggtgtggtggaagaggttcaatacgacaagtcacgtttaacgttgacgattaacgtgtttaatcgaccaactcaggttgaactcgaatttcgccaagtcgaaaaaacgatttaatcttaattggttgaaaagcgcccgattttatcgggcattgttgttgtaacagtattgttacgtagaaattggggagcctaacggcgcctgtacccagaggtattttaaaatggctaagaagattgacggctatatcaagctgcaagttccagctggtaaagcaaatccatctccaccaattggtcctgcactaggtcaacgtggtgtaaacatcatggcattctgtaaagaattcaatgctgctacacaaaaagttgaaccaggtcttccaattcctgtagtgattactgtgtacaacgacaagtcgttcacattcatcatgaaaactcctccagcttctattcttcttaagaaagctgctggtatccaaaagggttcatctgtacctaacaaaactaaagttggtaagttgactcgtgctcaattagaagaaatcgcgactactaaagaaccagacttaactggtgctgatttagacgcgcgtgttcgtaccattgctggttctgcacgttctatgggcttggaagtggagctataagacatggcaaagttaactaaacgtcaaaaagccattgctgctgctgtagaagcaaacaaagtttacactttggaagaagcagtacaggttcttaacagcttacctgctgcaaagttcaaagaatctttagacatctctgtaaaccttggcgtagatccacgtaaatctgatcaggttgttcgtggtgctactacattacctgcaggtactggtaaaactgtacgtgtagctgtatttgctcaaggcgctcaagcagaagctgctaaagaagctggtgctgatgttgtaggttttgatgaccttgctgaaagcatccaaggtggaaaccttgactttgatgttgtgatcgctgctccagacgctatgcgtgttgttggtaagctcggtacaattcttggtccacgtggtttaatgccaaaccctaaagtaggtactgtaactcctgatgttgcgaatgctgttaaaaacgcaaaatctggtcaggctcgttaccgtgtagacaaagcgggtattatccacgctgcgattggtcaagttggctttgatgctgctgcaatccgtcaaaacgttgaaactttagttgctgacttgaaaaagttaaaacctgcaacttctaaaggtgtatacatcaaaaagatcactttgagctcaactatgggtcctggtcttactgttgatgtaaacaacgtttctaactaagttttaacttagttctgtacagaattttaaagtcctgatcgagtaggtagcaaaaatagaaataagtttctatttttgcgcagttaaagcaacgctttgactcttgcttatcaggcggactttgaattgatgaatgagaatttatcagcgtcaaagacctcaggcgagaaggcgttattttcggatagcggcttttcttaataatccagcctgcgtagacgcggtggtgtgatttgttcctcctccgcgtgtaagtcgaaaggcttacgaattgggagtgtgcccattgggtgcataaatcaccttaggaggttttacaatggctcttcttatcgaagacaaaaaacagatcgtttcagaagtaagtgaagttgcttctaaagcgtttgcagccgttgttgctgactatcaaggtttaagcgtagagcaattaacaacacttcgtgttgaagctcgtaagttgggtgtaactacacgtatcgtacgtaacactttggctaagcgcgcattccaaggtactcaatttgatatcttgaacgacaaccttgttggtccaacaattctaggtttttcaacttctgaagatgacatgggtgcagctgcacgcttgtttgaagaatttgcaaaaactaacaaagcatttgaattaaaagctgctgcatttgacggcaaagtttatcaaggtgctgatgttagcgtaattgctaatcttccaaaccaagagaaagcgcttactatgcttgcctctgttcttcaagctcctatttcgaaattgggtcgcctcattacagcgctcaaagagaaaaacgagtcagaagctgcttaatcaattttacacaccattcaatatccatttggagttattctcatggctttaactaacgaagaaatcttaaacgcagttgctgaaaaaactgttcttgaacttgttgaattaatttctgctttcgaagagaaattcaacgtttcagctgcagctgttgctgttgctgctccagctggtggcgctgctgcagctgctgaagaacaatctgaattcaacgttgagttgacttctttcggtgctaacaaagtagctgttattaaagcagttcgtgaagcaactggccttggtcttaaagaagctaaagacctagttgaaggtgctcctcaagttcttaaagaaggcgtttctaaagaagaaggcgaagaacttaagaagaaacttgaagaagctggtgctacagttacacttaagtaattgtaaaaggagtcggtttttaaatacttaattaacggcactcctcagccaagtcaaaagcctccggtcggaggcttttgactacatgcccatggcgtttacgccccgccctgccactcatcgcagtactgttgtaattcattaagcattctgccgacatggaagccatcacaaacggcatgatgaacctgaatcgccagcggcatcagcaccttgtcgccttgcgtataatatttgcccatagtgaaaacgggggcgaagaagttgtccatattggccacgtttaaatcaaaactggtgaaactcacccagggattggctgagacgaaaaacatattctcaataaaccctttagggaaataggccaggttttcaccgtaacacgccacatcttgcgaatatatgtgtagaaactgccggaaatcgtcgtggtattcactccagagcgatgaaaacgtttcagtttgctcatggaaaacggtgtaacaagggtgaacactatcccatatcaccagctcaccgtctttcattgccatacggaactccggatgagcattcatcaggcgggcaagaatgtgaataaaggccggataaaacttgtgcttatttttctttacggtctttaaaaaggccgtaatatccagctgaacggtctggttataggtacattgagcaactgactgaaatgcctcaaaatgttctttacgatgccattgggatatatcaacggtggtatatccagtgatttttttctccattttagcttccttagctcctgaaaatctcgataactcaaaaaatacgcccggtagtgatcttatttcattatggtgaaagttggaacctcttacgtgccaagccaaataggccgt

SEQ ID NO: 321 - DNA, 9576 bp, Artificial
  Synthetic
tcagatccttccgtatttagccagtatgttctctagtgtggttcgttgtttttgcgtgagccatgagaacgaaccattgagatcatgcttactttgcatgtcactcaaaaattttgcctcaaaactggtgagctgaatttttgcagttaaagcatcgtgtagtgtttttcttagtccgttacgtaggtaggaatctgatgtaatggttgttggtattttgtcaccattcatttttatctggttgttctcaagttcggttacgagatccatttgtctatctagttcaacttggaaaatcaacgtatcagtcgggcggcctcgcttatcaaccaccaatttcatattgctgtaagtgtttaaatctttacttattggtttcaaaacccattggttaagccttttaaactcatggtagttattttcaagcattaacatgaacttaaattcatcaaggctaatctctatatttgccttgtgagttttcttttgtgttagttcttttaataaccactcataaatcctcatagagtatttgttttcaaaagacttaacatgttccagattatattttatgaatttttttaactggaaaagataaggcaatatctcttcactaaaaactaattctaatttttcgcttgagaacttggcatagtttgtccactggaaaatctcaaagcctttaaccaaaggattcctgatttccacagttctcgtcatcagctctctggttgctttagctaatacaccataagcattttccctactgatgttcatcatctgagcgtattggttataagtgaacgataccgtccgttctttccttgtagggttttcaatcgtggggttgagtagtgccacacagcataaaattagcttggtttcatgctccgttaagtcatagcgactaatcgctagttcatttgctttgaaaacaactaattcagacatacatctcaattggtctaggtgattttaatcactataccaattgagatgggctagtcaatgataattactagtccttttcctttgagttgtgggtatctgtaaattctgctagacctttgctggaaaacttgtaaattctgctagaccctctgtaaattccgctagacctttgtgtgttttttttgtttatattcaagtggttataatttatagaataaagaaagaataaaaaaagataaaaagaatagatcccagccctgtgtataactcactactttagtcagttccgcagtattacaaaaggatgtcgcaaacgctgtttgctcctctacaaaacagaccttaaaaccctaaaggcttaagtagcaccctcgcaagctcgggcaaatcgctgaatattccttttgtctccgaccatcaggcacctgagtcgctgtctttttcgtgacattcagttcgctgcgctcacggctctggcagtgaatgggggtaaatggcactacaggcgccttttatggattcatgcaaggaaactacccataatacaagaaaagcccgtcacgggcttctcagggcgttttatggcgggtctgctatgtggtgctatctgactttttgctgttcagcagttcctgccctctgattttccagtctgaccacttcggattatcccgtgacaggtcattcagactggctaatgcacccagtaaggcagcggtatcatcaacaggcttacccgtcttactgtcaagaggacatccggtcaaataaaacgaaaggctcagtcgaaagactgggcctttcgttttgctgaggagacttagggaccctttatgacaacttgacggctacatcattcactttttcttcacaaccggcacggaactcgctcgggctggccccggtgcattttttaaatacccgcgagaaatagagttgatcgtcaaaaccaacattgcgaccgacggtggcgataggcatccgggtggtgctcaaaagcagcttcgcctggctgatacgttggtcctcgcgccagcttaagacgctaatccctaactgctggcggaaaagatgtgacagacgcgacggcgacaagcaaacatgctgtgcgacgctggcgatatcaaaattgctgtctgccaggtgatcgctgatgtactgacaagcctcgcgtacccgattatccatcggtggatggagcgactcgttaatcgcttccatgcgccgcagtaacaattgctcaagcagatttatcgccagcagctccgaatagcgcccttccccttgcccggcgttaatgatttgcccaaacaggtcgctgaaatgcggctggtgcgcttcatccgggcgaaagaaccccgtattggcaaatattgacggccagttaagccattcatgccagtaggcgcgcggacgaaagtaaacccactggtgataccattcgcgagcctccggatgacgaccgtagtgatgaatctctcctggcgggaacagcaaaatatcacccggtcggcaaacaaattctcgtccctgatttttcaccaccccctgaccgcgaatggtgagattgagaatataacctttcattcccagcggtcggtcgataaaaaaatcgagataaccgttggcctcaatcggcgttaaacccgccaccagatgggcattaaacgagtatcccggcagcaggggatcattttgcgcttcagccatacttttcatactcccaccattcagagaagaaaccaattgtccatattgcatcagacattgccgtcactgcgtcttttactggctcttctcgctaacccaaccggtaaccccgcttattaaaagcattctgtaacaaagcgggaccaaagccatgacaaaaacgcgtaacaaaagtgtctataatcacggcagaaaagtccacattgattatttgcacggcgtcacactttgctatgccatagcatttttatccataagattagcggatcctacctgacgctttttatcgcaactctctactgtttctccatacccgttttacctgcaggtgcagtgaccgctgactttatcaggtatatcatgaccgaatcttttgcagccctctttgaagaaagtgaattaaacctcaacgttgaaaagggtgcagtcatccaaggtgttgttgtaaacatcgatagcgactgggttactgttgacactggccttaaatcagaaggcattgttgaccgtgctgaatttttaaatgaacaacgtgaacttgaagttcaggttggtgacactgttgacgtagttgttgaagctcttgacaacggtatgggtcaaacagttttatcacgtgaaaaagctaaacgtgctgaaacttggactaaacttgaaaaaatctttgaagatggcgaaatcgttactggtgttatctctggtaaagttaaaggcggtttcactgttgacatcggtcctgttcgtgcgttcttaccaggttcattagttgacactcgtcctatccgtgacactactcaccttgaaggtaaagagttagagtttaaagtaatcaaacttgatgctaaacgtaacaacgttgttgtatctcgtcgtgctgttatggaagctgaatcttctgctgaccgtgaagcattacttgctcaacttgaagaaggtcaaacagttacaggtactatcaagaaccttactgattacggtgcattcgttgatcttggcggtattgatggtcttcttcatatcacagatatggcttggaagcgtatcaagcacccttcagaagttgttgaagttggtcaagaagttactgttaaagtacttaaatttgaccgtgaacgtaaccgcgtatctttaggccttaaacaattaggcgaagatccatggttagcgatcatgagccgttaccctaaaggttctatcgttaaagcacgtgttactaacttaactgactacggttgtttcgctgaaatcgctgaaggcgttgaaggtttagtacacgtttctgaaatggaccacactaacaaaaacatccacccatctaaagttgttcagatcggtgacgaagttgatgttatggttcttgaagttgacgaagaacgtcgtcgtatcagccttggtatcaaacaaactcgtgctaacccatgggaagagtttgctaagtctcatgagaaaggcgaaaaagtttcaggcacaatcaagtctatcactgactttggtatcttcattggtttaaatggcggtatcgacggtctagttcacttgtctgatatttcttggaacgaacaaggcgaagaagctatccgtcgttacaagaaaggtgacactgttgaagcagttatcttgtctgtagacgctgaaggtaaccgtatcagccttggtatcaagcaattgaacagcgatccgttcaatgatttcttagctgctaacgaacgtggtgctttagttaaaggtactgtgactgcagttgatgctcgtggcgcaactgttaagttagctgacgaagtagaagctactcttaaagcttctgaaatcaaccgtgaccgcgttgaagatgcaactaaattcttagaagttggtcaagaagttgaagctaaaatcatcaacgttgatcgtaaatctcgctctatcaacttgtctatcaaagcgaaagacgaagctgaagagaaagaagcagtagctaacttacgtacagcatcagcttctcaagaaaatggtcctaagactattggtgacttgatcaaagcgcaaatgaagtaataagttaacaaagtacagtttcatgtttttaagcatctcggagaaatcgaatggctttaactaatgcagaccgcgcagagatcattgctaaatttgctcgcgctgaaaacgacactggttcaccagaagtacaagtagctttattgactgctcaaatcaatgatttacaaggtcactttaaagctcacaaacacgaccaccatagccgtcgcggtttgatccgtatggttaaccaacgtcgtaaattacttgactacttaaatggtaaagaccacgagcgttacactgctttgatcggtgctttaggtctacgtcgttaattcgattttgctttgttttcggtttcaacttattttcaaggagtgcaagagtggcaaactctgctcaagctaaaaaacgtgcgcgccaaaacgttaaagcgcgtaaacacaacgcaagcttgcgttctatggttcgtacttacatcaaacgtactttaagtgcaatcgctggtggtgattatgctgttgctacagaagcttacaaaaaagctgttcctgtaatcgaccgcatggctgataaaggcatcatccacaaaaataaagctgctcgtcataagagccgtttaaatgctcaagttaaagctttagctaactaattgaagcatgtaaaaaaagcccgtaagaattataaggcttttatcatggttgttattcgtttagcacgtggcggcgcaaaaaaacgtccattctatcaaatcgttgtgactgatagccgcaatgcacgtgatggtcgtttcatcgagcgtatcggtttctttaacccaactgcacaaggtcaagcagaaaaacttcgtttagacgcagaccgttttgctcactgggtttctcaaggtgctcaaccttctgaacgtgttgcttctttggctgctcaagctaaaaaagctactgcataattattgtagtaggtagcccatgacactgtttaaaccgtaaggagctgacaatgcgtcattacgaaatcgtacttttggtacatccagaccaaagcgatcaagttgtaggtatggttgaacgctatatctctcagatcaaagaagctgatggtcaaattcaccgtttagaagattggggccgtcgtcaattggcttacccaattaacaaaattcacaaagcgcactacattcttatgaatgttgaatgtggtcaaactacgcttgatgagttagaagaattattccgttataacgacgcgatcattcgtaaccttatcatccgtcgtgaacacgcaatcactgaagagtcattgcttgctaagagtgctgaagaaaagcgtgcgcgtaaagctcaacgcgaagaagcacagcaagttgctcaagaagctgaataaggagaacatcaatggcacgtttttaccgtcgtcgcaagttctgccgctttacagctgagaatgttgcgtacatcgactacaaagatatcgacactttaaaacagtacatcactgaaaacggcaagattgttcctagccgtatcactggtactaaagctcgttatcaacgtcaattagcacttgctatcaaacaagctcgctatttgtctttgattccgtacactgacaaccataagtgaggtgatctgtggacgttatcttattacaacgcattaagaaccttggtaaattaggcgataaagtatcagttaaagctggttacggccgtaactttcttatccctcaaggtaaagcagttgcagctactgaagctaacactgctgcttttgaagctcgtcgtgctgaacttgagaagcaagaagctgaagtattagctgctgctcaagcacgtgctgaacaattgaatgaagttaacatcgttatcactgctaaagctggtgacgaaggtaaactcttcggttctatcggtactcgtgacatcgctgacgcgttaacgaatgctggtcttacagttgaccgtgcagaagttcgtttaccaaacggtgcgcttcgtcacactggtgaattcaacatcgcaatccaattgcatcatgatgttgttgcagaagttctcgttactatcgtatctgagtaatttctcatcaaaaaaagagcatgctaccaactataataggtagtggtttaatgaaaactctcagcgctaagccagctgaagttcaacatgactggtatgttgttgatgcttctggcaaaactttaggtcgccttgcgactgaaatcgctcgtcgtttacgcggtaagcataaaacttcttatactcctcacgttgacactggcgattacatcgttgtgattaatgctgaacaaattcaagtgactggtaacaaatcacttgataagaaatattatcgccatactggtttccctggtggtatccgtgagactaacttcgagaagttaattgctcacaaacctgaagctgttcttgaaaaagcggttaaaggcatgttaccaaaaggtcctcttggttatgcaatgatcaaaaaaatgaaagtgtacgctggtactgagcatcctcatgctgctcaacagccacaagttttggacatctaagggatacagcacatggctactaattatggtacaggtcgccgtaagaccgcaactgcacgtgttttcttgtcagctggtacaggtaaactcgttattaacaaccgtactttagagcaatatttcggtcgtgaaactgctcgtatggttgttcgtcaacctttagaacttttagaagttactgaaaagtttgacctttacatcactgttaaaggtggtggtatcggtggtcaagctggcgcgatccgtcacggtattactcgtgcgcttatcgctgctgacgaaactttaaaacctgttctacgtcaagctggtttcgttactcgtgatgctcgtgaagttgagcgtaagaaacttggtttacgtaaagctcgtaaacgtcctcaattctctaaacgttaattcgtttaccgaatcggacaaaaagttatccataatctagaggattttacatgccacaagttaagttgaaagaaggcgaaccagttgacgtagctatccgtcgtttcaaacgttcatgcgaaaaagctggtgttttagctgacgttcgtaagcgcgaattctacgaaaaaccaactcaagaacgtaagcgcaaaaaagctgctgcagttaaacgctaccaaaagaaattggctcgcgaatctgtacgtactactcgcctttactaattaatttgtgattgactgctaacattaacccaacttttaaggtaaagaaaatggcagattacaacgtaagcatgcgcgaccttcttcaagcaggtgcgcactttggtcaccaaactcgtttctggaacccaaaaatgcgtcaatacatttttggcgcgcgcaacaaaattcacatcatcaaccttgagcacactgttcctgcgttaaatgatgctttgaacttcgctaaccaattagcaagcaaaaagaacaaagttttgttcgttggtacaaaacgtgctgcttctaacatcatccgtgaacaagctcaacgcgctggtcaaccatatgtagaccaccgttggttaggtggtatgttgacgaactggaaaacacttcgccaatctatcaaccgtttaaaagatcttcaaactcaatctcaagacggtacttttgctaagcttactaaacgtgaagctttagaacgtactcgtgagatggaaaaacttgagcgctctttaggcggcgttaaaaacatgggtggtttacctgacgcattatttgtaatcgacgttgatcacgaagcgattgcaattaaagaagctaagaacttaggtattcctgttatcggtatcgttgatacaaactctaacccagataacgttgattacgttattcctggtaacgacgatgcgatccgtgcagtaactttatatgcttcagctatggctgatgcaattcttgctggtaaagaatacgctcaatctcaagcgaacgctcaagcaaaaggcgatgacgctgcgaaagacgcttctgaggcttaatgcgttttgacgcaggcttgtcattacttaattaacggcactcctcagccaagtcaaaagcctccggtcggaggcttttgactacatgcccatggcgtttacgccccgccctgccactcatcgcagtactgttgtaattcattaagcattctgccgacatggaagccatcacaaacggcatgatgaacctgaatcgccagcggcatcagcaccttgtcgccttgcgtataatatttgcccatagtgaaaacgggggcgaagaagttgtccatattggccacgtttaaatcaaaactggtgaaactcacccagggattggctgagacgaaaaacatattctcaataaaccctttagggaaataggccaggttttcaccgtaacacgccacatcttgcgaatatatgtgtagaaactgccggaaatcgtcgtggtattcactccagagcgatgaaaacgtttcagtttgctcatggaaaacggtgtaacaagggtgaacactatcccatatcaccagctcaccgtctttcattgccatacggaactccggatgagcattcatcaggcgggcaagaatgtgaataaaggccggataaaacttgtgcttatttttctttacggtctttaaaaaggccgtaatatccagctgaacggtctggttataggtacattgagcaactgactgaaatgcctcaaaatgttctttacgatgccattgggatatatcaacggtggtatatccagtgatttttttctccattttagcttccttagctcctgaaaatctcgataactcaaaaaatacgcccggtagtgatcttatttcattatggtgaaagttggaacctcttacgtgccaagccaaataggccgt

SEQ ID NO: 322 - DNA, 7014 bp, Artificial
  Synthetic
tcagatccttccgtatttagccagtatgttctctagtgtggttcgttgtttttgcgtgagccatgagaacgaaccattgagatcatgcttactttgcatgtcactcaaaaattttgcctcaaaactggtgagctgaatttttgcagttaaagcatcgtgtagtgtttttcttagtccgttacgtaggtaggaatctgatgtaatggttgttggtattttgtcaccattcatttttatctggttgttctcaagttcggttacgagatccatttgtctatctagttcaacttggaaaatcaacgtatcagtcgggcggcctcgcttatcaaccaccaatttcatattgctgtaagtgtttaaatctttacttattggtttcaaaacccattggttaagccttttaaactcatggtagttattttcaagcattaacatgaacttaaattcatcaaggctaatctctatatttgccttgtgagttttcttttgtgttagttcttttaataaccactcataaatcctcatagagtatttgttttcaaaagacttaacatgttccagattatattttatgaatttttttaactggaaaagataaggcaatatctcttcactaaaaactaattctaatttttcgcttgagaacttggcatagtttgtccactggaaaatctcaaagcctttaaccaaaggattcctgatttccacagttctcgtcatcagctctctggttgctttagctaatacaccataagcattttccctactgatgttcatcatctgagcgtattggttataagtgaacgataccgtccgttctttccttgtagggttttcaatcgtggggttgagtagtgccacacagcataaaattagcttggtttcatgctccgttaagtcatagcgactaatcgctagttcatttgctttgaaaacaactaattcagacatacatctcaattggtctaggtgattttaatcactataccaattgagatgggctagtcaatgataattactagtccttttcctttgagttgtgggtatctgtaaattctgctagacctttgctggaaaacttgtaaattctgctagaccctctgtaaattccgctagacctttgtgtgttttttttgtttatattcaagtggttataatttatagaataaagaaagaataaaaaaagataaaaagaatagatcccagccctgtgtataactcactactttagtcagttccgcagtattacaaaaggatgtcgcaaacgctgtttgctcctctacaaaacagaccttaaaaccctaaaggcttaagtagcaccctcgcaagctcgggcaaatcgctgaatattccttttgtctccgaccatcaggcacctgagtcgctgtctttttcgtgacattcagttcgctgcgctcacggctctggcagtgaatgggggtaaatggcactacaggcgccttttatggattcatgcaaggaaactacccataatacaagaaaagcccgtcacgggcttctcagggcgttttatggcgggtctgctatgtggtgctatctgactttttgctgttcagcagttcctgccctctgattttccagtctgaccacttcggattatcccgtgacaggtcattcagactggctaatgcacccagtaaggcagcggtatcatcaacaggcttacccgtcttactgtcaagaggacatccggtcaaataaaacgaaaggctcagtcgaaagactgggcctttcgttttgctgaggagacttagggaccctttatgacaacttgacggctacatcattcactttttcttcacaaccggcacggaactcgctcgggctggccccggtgcattttttaaatacccgcgagaaatagagttgatcgtcaaaaccaacattgcgaccgacggtggcgataggcatccgggtggtgctcaaaagcagcttcgcctggctgatacgttggtcctcgcgccagcttaagacgctaatccctaactgctggcggaaaagatgtgacagacgcgacggcgacaagcaaacatgctgtgcgacgctggcgatatcaaaattgctgtctgccaggtgatcgctgatgtactgacaagcctcgcgtacccgattatccatcggtggatggagcgactcgttaatcgcttccatgcgccgcagtaacaattgctcaagcagatttatcgccagcagctccgaatagcgcccttccccttgcccggcgttaatgatttgcccaaacaggtcgctgaaatgcggctggtgcgcttcatccgggcgaaagaaccccgtattggcaaatattgacggccagttaagccattcatgccagtaggcgcgcggacgaaagtaaacccactggtgataccattcgcgagcctccggatgacgaccgtagtgatgaatctctcctggcgggaacagcaaaatatcacccggtcggcaaacaaattctcgtccctgatttttcaccaccccctgaccgcgaatggtgagattgagaatataacctttcattcccagcggtcggtcgataaaaaaatcgagataaccgttggcctcaatcggcgttaaacccgccaccagatgggcattaaacgagtatcccggcagcaggggatcattttgcgcttcagccatacttttcatactcccaccattcagagaagaaaccaattgtccatattgcatcagacattgccgtcactgcgtcttttactggctcttctcgctaacccaaccggtaaccccgcttattaaaagcattctgtaacaaagcgggaccaaagccatgacaaaaacgcgtaacaaaagtgtctataatcacggcagaaaagtccacattgattatttgcacggcgtcacactttgctatgccatagcatttttatccataagattagcggatcctacctgacgctttttatcgcaactctctactgtttctccatacccgttttacctgcaggtgcagttccgcacatattggagattcccacaatgagtggtaaacatcctttagttcaagctgttgaaaatgcacagttaaaaactgaccttcctgaatttgctcctggtgacacagtagttgttcaagttaaagtaaaagaaggtgatcgtgaacgtcttcaggcatttgaaggtgttgttatcgctaagaaaaaccgtggtttgaactctgcgttcacagtacgtaaaatttctagcggtgttggtgttgagcgtgtattccaaactcactcaccagttgttgctaaaatcgaagtgaaacgtcgtggtgacgttcgtcgtgctaaactttactacctccgtgacttgtctggtaaagctgcacgtattcgtgaaaaattaccagctcgtaaagcgtaagcttataccgagtaaaaaaatgcgcgaacaggtgcctaaaagaggttactatggctaagttaaaaactcgccgtggtgcagctaaacgcttcaaagcgactgcaaacggttttaagcgtaaacaagcgttcaagcgccacatcttgaccaaaaaatctgctaaacgtatccgtcaattacgcggctgtgtaatggttcatgtttctgacatgaattcagttcgtcgtatgtgcccatacatctaaggagattataaatggctcgtgtaaaacgtggtgtagtggctcatcgtcgtcacaaaaaaattcttgctcgcgctaaaggttactatggtgctcgttcacgcgtttaccgcgtagcgttccaagcggtaatcaaagctggtcaatacgcttaccgtgaccgccgtcaaaagaaacgtcaattccgtgctctatggattgcgcgtatcaatgctggtgctcgtcaaaacggtttgtcttacagccgtatgatcgatggcttgaaaaaagctcaagtgatcatcgaccgtcgcgtattagctgacatcgctatgcatgatgcagtagcatttgctgctttagctgaaaaagctaaaggtgcattagctgcataagcttagagattcaaaaagaggccgccgacacgggctgattggagtacgttatgtacgcagtaatccaaagcggtggtaaacagcaccgtgtagttgagggtgaaacccttaaagttgaattattgaaggctgaatctggcgcaactattacatttgatgatgtattaatggttgtaaacggtgacaacattcaaatcggtgctccagttgtagctggcgctaaagtaactgcagaagtgattggtcatggtcgtcacgacaaaatccgcattatcaaaatgcgtcgtcgtaaacactaccgtaagcaacaaggtcaccgtcaatggttcactgagttgaaaattactggtatttcaggctaatcacgaggagtaagagacatggcaactaaaaaagccggtggatcgacgaagaacggtcgtgattcaaacccaaaaatgttaggtgttaaagtttacggtggtcaaactgtaactgctggtaacatcatcgttcgtcaacgtggtacagaattccacgctggtgcaaatgttggtatgggccgtgaccatactttatttgctactgctgacggcgtagtaaaattcgaagtgaaaggtcaatttggccgtcgctacgtaaaagttgaaactgtttaagttttagcttaagaaaaagcccacattaatctttaatgaggatttatctcatggcaaacttcatattcaacgctcaagcgcgtgctgaagacaaacaagggaaaggtgcgagccgccgccttcgtcgcgaatctttagttccagctatcatctacggtggtaacgctgaacctgtaagtgttactttagaacttcgtgagcttgtaaaagctttagaaagcaatgctttctttgaagaagttgtagaaatcaaaatgggcgataaagttgaaaacgttaaaatccaagcgttacaacgtcacccatctaaaaacactcctatgcacgctgacttcaaacgcgcataagtgtttaaaggcgtaaattagtgtcttggctaaatcaatggagttacaccatgtctaaggtttgccaagttaccggcaagcgtccagtcgttggtaacaacgtctcacacgccaacaacaaaaccaagcgccggttcgagccgaacctgcaccaccaccgtttctggttagaaagcgaaaaacgttttgtacgtcttcgtttaaccactaaaggtatgcgtattattgacaaattgggtatcgaaaaggttattgcagaccttcgtgctcaaggtcaaaagatctaaggagtctgagcaatgcgtgataagattcgtctcgtttcttcagctggtacaggttatttctataccacaactaaaaacaaacgtactatgccggaaaaaatggaaatcaaaaaatttgatccaaaaatccgtcaacacgtgattttcaaagaagctaaaatcaaataattttagcgtcgaaaaaaacgacttctttcttcaattaggagtaatcgacgatgcgcgccgatattcacccaaaatatgaaaaattagttgcaacttgctcatgcggtaacgtaatcgaaactcgttctgctttaggtaaagaaactatttaccttgacgtatgttcagcttgccaccctttctacactggtaaacaaaagaatgtagacactggtggtcgtatcgacaaattcaaacaacgttttgctggtatgtctcgctctatcaagcgttaatacttcaaaacgaaacaaaaaacggttttcgatctttgtaaggagccatcatggccgttcagcaaaaccgtaaaagtcgctctcgccgtgacatgcgccgttcacatgacgctttaaccgagaatgcattaacagtagaccaagcaactggtgaaactcatcgtcgtcaccacgtgactaaagacggtttctaccgtggtcgccaattattcgctaaagcagctgatgctgaataattgcatgatatgcattaagcgtgataaagatcatttttgggagtttcgatatgaaacgtactttccaaccatctgaattaaagcgtaaacgcgttcatggtttccgtgctcgtatggcaactaaagctggtcgtcaagtattagctcgtcgtcgtgcaaaaggtcgtcatagcttaactgtttaattactgttacgctgaccagacttggacttaattaacggcactcctcagccaagtcaaaagcctccggtcggaggcttttgactacatgcccatggcgtttacgccccgccctgccactcatcgcagtactgttgtaattcattaagcattctgccgacatggaagccatcacaaacggcatgatgaacctgaatcgccagcggcatcagcaccttgtcgccttgcgtataatatttgcccatagtgaaaacgggggcgaagaagttgtccatattggccacgtttaaatcaaaactggtgaaactcacccagggattggctgagacgaaaaacatattctcaataaaccctttagggaaataggccaggttttcaccgtaacacgccacatcttgcgaatatatgtgtagaaactgccggaaatcgtcgtggtattcactccagagcgatgaaaacgtttcagtttgctcatggaaaacggtgtaacaagggtgaacactatcccatatcaccagctcaccgtctttcattgccatacggaactccggatgagcattcatcaggcgggcaagaatgtgaataaaggccggataaaacttgtgcttatttttctttacggtctttaaaaaggccgtaatatccagctgaacggtctggttataggtacattgagcaactgactgaaatgcctcaaaatgttctttacgatgccattgggatatatcaacggtggtatatccagtgatttttttctccattttagcttccttagctcctgaaaatctcgataactcaaaaaatacgcccggtagtgatcttatttcattatggtgaaagttggaacctcttacgtgccaagccaaataggccgt

SEQ ID NO: 323 - DNA, 4568 bp, Artificial; identical to SEQ ID NO: 213
  Synthetic

SEQ ID NO: 324 - DNA, 13880 bp, Artificial
  Synthetic
tcagatccttccgtatttagccagtatgttctctagtgtggttcgttgtttttgcgtgagccatgagaacgaaccattgagatcatgcttactttgcatgtcactcaaaaattttgcctcaaaactggtgagctgaatttttgcagttaaagcatcgtgtagtgtttttcttagtccgttacgtaggtaggaatctgatgtaatggttgttggtattttgtcaccattcatttttatctggttgttctcaagttcggttacgagatccatttgtctatctagttcaacttggaaaatcaacgtatcagtcgggcggcctcgcttatcaaccaccaatttcatattgctgtaagtgtttaaatctttacttattggtttcaaaacccattggttaagccttttaaactcatggtagttattttcaagcattaacatgaacttaaattcatcaaggctaatctctatatttgccttgtgagttttcttttgtgttagttcttttaataaccactcataaatcctcatagagtatttgttttcaaaagacttaacatgttccagattatattttatgaatttttttaactggaaaagataaggcaatatctcttcactaaaaactaattctaatttttcgcttgagaacttggcatagtttgtccactggaaaatctcaaagcctttaaccaaaggattcctgatttccacagttctcgtcatcagctctctggttgctttagctaatacaccataagcattttccctactgatgttcatcatctgagcgtattggttataagtgaacgataccgtccgttctttccttgtagggttttcaatcgtggggttgagtagtgccacacagcataaaattagcttggtttcatgctccgttaagtcatagcgactaatcgctagttcatttgctttgaaaacaactaattcagacatacatctcaattggtctaggtgattttaatcactataccaattgagatgggctagtcaatgataattactagtccttttcctttgagttgtgggtatctgtaaattctgctagacctttgctggaaaacttgtaaattctgctagaccctctgtaaattccgctagacctttgtgtgttttttttgtttatattcaagtggttataatttatagaataaagaaagaataaaaaaagataaaaagaatagatcccagccctgtgtataactcactactttagtcagttccgcagtattacaaaaggatgtcgcaaacgctgtttgctcctctacaaaacagaccttaaaaccctaaaggcttaagtagcaccctcgcaagctcgggcaaatcgctgaatattccttttgtctccgaccatcaggcacctgagtcgctgtctttttcgtgacattcagttcgctgcgctcacggctctggcagtgaatgggggtaaatggcactacaggcgccttttatggattcatgcaaggaaactacccataatacaagaaaagcccgtcacgggcttctcagggcgttttatggcgggtctgctatgtggtgctatctgactttttgctgttcagcagttcctgccctctgattttccagtctgaccacttcggattatcccgtgacaggtcattcagactggctaatgcacccagtaaggcagcggtatcatcaacaggcttacccgtcttactgtcaagaggacatccggtcaaataaaacgaaaggctcagtcgaaagactgggcctttcgttttgctgaggagacttagggaccctttatgacaacttgacggctacatcattcactttttcttcacaaccggcacggaactcgctcgggctggccccggtgcattttttaaatacccgcgagaaatagagttgatcgtcaaaaccaacattgcgaccgacggtggcgataggcatccgggtggtgctcaaaagcagcttcgcctggctgatacgttggtcctcgcgccagcttaagacgctaatccctaactgctggcggaaaagatgtgacagacgcgacggcgacaagcaaacatgctgtgcgacgctggcgatatcaaaattgctgtctgccaggtgatcgctgatgtactgacaagcctcgcgtacccgattatccatcggtggatggagcgactcgttaatcgcttccatgcgccgcagtaacaattgctcaagcagatttatcgccagcagctccgaatagcgcccttccccttgcccggcgttaatgatttgcccaaacaggtcgctgaaatgcggctggtgcgcttcatccgggcgaaagaaccccgtattggcaaatattgacggccagttaagccattcatgccagtaggcgcgcggacgaaagtaaacccactggtgataccattcgcgagcctccggatgacgaccgtagtgatgaatctctcctggcgggaacagcaaaatatcacccggtcggcaaacaaattctcgtccctgatttttcaccaccccctgaccgcgaatggtgagattgagaatataacctttcattcccagcggtcggtcgataaaaaaatcgagataaccgttggcctcaatcggcgttaaacccgccaccagatgggcattaaacgagtatcccggcagcaggggatcattttgcgcttcagccatacttttcatactcccaccattcagagaagaaaccaattgtccatattgcatcagacattgccgtcactgcgtcttttactggctcttctcgctaacccaaccggtaaccccgcttattaaaagcattctgtaacaaagcgggaccaaagccatgacaaaaacgcgtaacaaaagtgtctataatcacggcagaaaagtccacattgattatttgcacggcgtcacactttgctatgccatagcatttttatccataagattagcggatcctacctgacgctttttatcgcaactctctactgtttctccatacccgttttacctgcaggtgcagtgaaaaacaggggaacggacaatgagtgaaaaaacagtccgcacgttaaccggcaaagtcgtaagtgacaaaatggataaatctattgttgttcttattgaacgccgcgttcaacacccgttgtatggcaagtcaattcgccgttcaactaagttacacgctcatgatgagaacaacgttgctaaaattggtgatgttgtaaccattaaagaaagccgcccaatttctaaaactaaagcttggactttagtggaagtagttgaagcagctgctgagtaattcgacgttattttcaaggagtgcaagagtggcaaactctgctcaagctaaaaaacgtgcgcgccaaaacgttaaagcgcgtaaacacaacgcaagcttgcgttctatggttcgtacttacatcaaacgtactttaagtgcaatcgctggtggtgattatgctgttgctacagaagcttacaaaaaagctgttcctgtaatcgaccgcatggctgataaaggcatcatccacaaaaataaagctgctcgtcataagagccgtttaaatgctcaagttaaagctttagctaactaattgaagcagcgtgtaaggagaaacattcatggctcgttatattggtccaaaatgcaaactctctcgccgcgaagggacagacctgcaacttaaatctggcgttaaaccatttgacgtcaaaactaaaaaagctaacaaagcacctggtcaacacggtcaggctcgcggtggtaagcaatctgagtattcactacaattacgtgaaaaacaaaaagtccgtcgtatttacggtgtgttagagcgtcaatttagtaactactataaagaagcagctcgtgtaaaaggcgcaactggtgagaacttgttgaaattgcttgaaagccgtcttgataacgttgtttatcgcatgggttttggttctacacgtgcagaagctcgtcagttagtaagtcaccgtagcattactttgaatggtcgtcgtgtaaacatcgcatctattcaagttaaagcgggtgatgtaattgcggttcacgaaggtgctaaacaacaattgcgtatcaaaaacgcgattgaattagctgctcaacgtggtattccagcttggattgatgttgatcattctaaacttgaaggtacgtttaaagctgcaccagatcgttctgatttacctgctgaaatcaacgaaagcttgattgtagaattgtattctaaataatccttgagagctggtaaggagcgactaaatgagtatgcaagataccgttgccgacatgctaacacgtgttcgtaacgcacaaatggctaagaaacaaacagtttctatgccttcttctaagttgaaagttgcaattgcaaacgtacttcaacaagaaggttatatttcaaatgtagaagttgctcaagaagagacaaaatctactttgacaattactttaaaatatttcgaaggcaaaccagttatcgaaatggttaagcgcgtaagccgtccaggtcttcgccaataccgtggtaaagataaacttccaagcgttaagcaaggtttaggtattgcaattgtttctacaagcaaaggcatcatgactgatcgcgctgcacgtgctgcaggcgttggtggtgaagttattgcttttgtttcttaataggtgatagaattataaggcttttatcatggttgttattcgtttagcacgtggcggcgcaaaaaaacgtccattctatcaaatcgttgtgactgatagccgcaatgcacgtgatggtcgtttcatcgagcgtatcggtttctttaacccaactgcacaaggtcaagcagaaaaacttcgtttagacgcagaccgttttgctcactgggtttctcaaggtgctcaaccttctgaacgtgttgcttctttggctgctcaagctaaaaaagctactgcataattattgtaaataacgggagaattgccatatggcaacaacgaatcagttgatccgtaagggtcgtacgactttggttgaaaaatccaaagttcctgcgttgaaggcttgtccacaacgtcgtggtgtttgtacacgtgtttatacaactacacctaaaaaacctaactcagctatgcgtaaggtttgccgtgttcgcttaacttcaggttttgaagtatctagctacatcggtggtgaaggtcataacttacaagagcacagtgttgttcttatccgtggtggtcgtgttaaagacttaccaggtgtacgttaccataccgttcgtggttctttagactgtgccggcgttaaagatcgtaatcaatcacgttctaaatacggtactaagcgtcctaagaagtaattctaggaaacggcttggagttctaatcatggctaaagttgaacaaaacgaaggtcttgttgaaaagctggttgccgttgatcgtgtagccaaagttgttaagggcggtcgtatcttctctttcacagcattaactgttgtgggtgatggtaatggtcgtgttggttttggtcgtggtaaagcacgtgaagttcctgctgctatttctaaagcacttgaagctgctcgtcgcaacatgatcactgtagaccttgctggtactactttacaacaccctgtgaatgctcgtcatggtgcaagccgtgtatacatgcaacctgcttcagaaggtactggcgtaatcgctggtggtgcaatgcgtgccgttcttgaagctgcaggtgtacataacgtacttgctaaatgttatggttctacaaatgctgctaacgtagtaaacgcaacttttaaaggtttgcgtgatatgacttctcctgagaaagtcgctgcgaaacgtggtaaatcagtagaagaaattcaagggtaatcaatcatagatttctggaagctaaaagatggctaaagatactcgcacacgcaagaaggtcactcgtaccgtctctgaaggtgttgcacacattcacgcgtcttttaataacaccattgttacgattaccgatcgtcaaggtaatgcattggcttgggccacctcaggtggacaaggcttccgtggttcacgtaaatcaactccgtttgctgctcaggtagctgctgaagttgctggtaaagcagctttagattacggtttgaaaaaccttgacgtccttgtaaaaggtcctggtccaggtcgtgagtctgcggttcgtgcattaggcgcagtgggttataagattaacagcattaccgatgtgactccaattcctcacaacggttgccgtccacctaaaaaacgtcgcgtgtaaggagaaacaagcatctcggagaaatcgaatggctttaactaatgcagaccgcgcagagatcattgctaaatttgctcgcgctgaaaacgacactggttcaccagaagtacaagtagctttattgactgctcaaatcaatgatttacaaggtcactttaaagctcacaaacacgaccaccatagccgtcgcggtttgatccgtatggttaaccaacgtcgtaaattacttgactacttaaatggtaaagaccacgagcgttacactgctttgatcggtgctttaggtctacgtcgttaattcgattttaaaccgtaaggagctgacaatgcgtcattacgaaatcgtacttttggtacatccagaccaaagcgatcaagttgtaggtatggttgaacgctatatctctcagatcaaagaagctgatggtcaaattcaccgtttagaagattggggccgtcgtcaattggcttacccaattaacaaaattcacaaagcgcactacattcttatgaatgttgaatgtggtcaaactacgcttgatgagttagaagaattattccgttataacgacgcgatcattcgtaaccttatcatccgtcgtgaacacgcaatcactgaagagtcattgcttgctaagagtgctgaagaaaagcgtgcgcgtaaagctcaacgcgaagaagcacagcaagttgctcaagaagctgaataaggagaacagctgaataaggagaacatcaatggcacgtttttaccgtcgtcgcaagttctgccgctttacagctgagaatgttgcgtacatcgactacaaagatatcgacactttaaaacagtacatcactgaaaacggcaagattgttcctagccgtatcactggtactaaagctcgttatcaacgtcaattagcacttgctatcaaacaagctcgctatttgtctttgattccgtacactgacaaccataagtgaggtgatctcataatctagaggattttacatgccacaagttaagttgaaagaaggcgaaccagttgacgtagctatccgtcgtttcaaacgttcatgcgaaaaagctggtgttttagctgacgttcgtaagcgcgaattctacgaaaaaccaactcaagaacgtaagcgcaaaaaagctgctgcagttaaacgctaccaaaagaaattggctcgcgaatctgtacgtactactcgcctttactaattaatttgatattattaggtgtattaaaatgccaagacgtcgcgtagtcgctgctcgtgagatccttccagatccaaaatttagcagccaaacaatcgctaaattcatgaaccacgtaatgcaagatggtaaaaaatctattgctgaaagtatcgtttacggtgctttagaacgcgttcaagaaaaaaacaaagtagacccagttgaatttttcgagactactcttgagaaagttcgtcctatggtcgaagtaaaagcacgccgtgttggtggtgctacttatcaagtacctatggaagtacgcccatcccgtcgtactgccttagcaatgcgttggttagtagatgctgctgctaagcgttctgaaaaaactatggctttacgtcttgctggcgagttgcttgatgcagctgaaggcaaaggtgccgcgatcaaaaaacgtgaagacgtgcatcgtatggcagaagctaacaaagccttctctcactaccgtttctaagcggataaacatctaagggatacagcacatggctactaattatggtacaggtcgccgtaagaccgcaactgcacgtgttttcttgtcagctggtacaggtaaactcgttattaacaaccgtactttagagcaatatttcggtcgtgaaactgctcgtatggttgttcgtcaacctttagaacttttagaagttactgaaaagtttgacctttacatcactgttaaaggtggtggtatcggtggtcaagctggcgcgatccgtcacggtattactcgtgcgcttatcgctgctgacgaaactttaaaacctgttctacgtcaagctggtttcgttactcgtgatgctcgtgaagttgagcgtaagaaacttggtttacgtaaagctcgtaaacgtcctcaattctctaaacgttaattcgtttagcctttttggagaaaagtgaatggctcgtattgccggtgtaaacattccggataacaagcatgctgttatctccctcacttacatctttggtatcggtcgccacactgctaagaatatcttagctacagttggtattactgagactactaagatccgtgagttggacgatgctcagcttgatgcgattcgtgcagaagttgctaaggttcctaccgaaggtgacttacgtcgcgaaatttccatgaacattaaacgtttaatggatttaggttgctatcgtggccttcgtcatcgtcgcagcttgcctgtccgtggtcaacgcaccaaaactaacgcacgtacccgtaaaggtccgcgcaaaccgattaaaaagtaacatatctgcaagtaaaggaatctgactaatgcctcgttctctgaaaaaaggcccattcgtcgatgcgcacttgttcgctaaggttgaagcggctgttgctagtaactctcgcaagccgatcaaaacttggtctcgtcgttcgatgatccttccagattttgttggtttaacaatctctgttcataatggtcgtaatcacgttccagtaattgttactgagcatatggttggtcataaactcggtgaattcgcgccaactcgtacctatcgtggtcacggtgttgacaagaaatctaaacgttaataggtgtcttggcttggagtttactggtatgtctaaccagagaattcgtatccgtcttaagtcttttgatcatcgtctgattgatcaatctgctcaagagatcgtagaaaccgctaagcgtaccggcgcacaagtttgtggtccaattccgatgcctactcgcatcgaacgcttcaacgttcttacttcaccgcacgttaacaaagatgcgcgtgaccagtacgaaatccgcacctacaaacgtttgatcgacatcgttcaacctacagataaaactgttgatgcattgatgaagttagatcttgcagctggtgttgatgttcagatcgctttgggttaaggctttcgcgttcaaataagaggtcgatatggctaagaaaggtatgattaatcgcgaattgaaacgcgaaaaaacagttgctaaatacgctgcaaaacgtgctgaattaaaagctacaattgcaaacgtaaacgcaagtgaagaagagcgtttcgaagcgatgttaaagttacaagcattgccacgtaatgcatctccggtacgtcttcgtaaccgttgtggtttaactggtcgtcctcatggttacttccgtaagttcggtttaagccgtaacaaattacgtgacacagtaatgcagggtgatgtaccaggcgttgttaaggcaagctggtaaggagcgaccgttaaggtaggggtttgatatgggtcagaaggttcatccaatcggtatccgcctaggtgttgtgaaacgtcataacgctaactggtatgcgaatccgaaacaatacgctgaatacttgcttaaagatcttcaagttcgtgagtttttaactaaaaaacttaagaatgcgatggtaagcaatattcttatcgaacgtccatcaggcgctgctaaagtaactattagcacagctcgtcctggtatcgtaatcggtaaaaaaggcgaagatattgagaaattacagcgcgaacttaccagcattatgggtgttccagcgcaagtaagtatcaacgaaattgatcgcccagacttagatgcgcgtttagttgctgaagcaattgcttctcaattagaaaagcgtgttatgttccgtcgtgctatgaagcgtgcggttcaaaacactatgcgtgctggtgctaaaggtatcaaagttgaagtgtctggccgtttaggtggtgcagagattgctcgtacagaatggtatcgtgaaggtcgtgtacctttgcatacattacgtgcagacattgactatgcaactatgcgtgcagaaacaacttacggtacgattggtgttaaagtttggattttccgtggcgagatcttaggtggcatgaaacaagtcatgaaccctgctcctgctgaagatcgtccagctaaacgtggtcgtggtcgtggtgaaggtcaagagcgtcgtggtcgtcgcggtgaccgtgctgctgacaagggagaataatccatgttcaacttttaaggtaaagaaaatggcagattacaacgtaagcatgcgcgaccttcttcaagcaggtgcgcactttggtcaccaaactcgtttctggaacccaaaaatgcgtcaatacatttttggcgcgcgcaacaaaattcacatcatcaaccttgagcacactgttcctgcgttaaatgatgctttgaacttcgctaaccaattagcaagcaaaaagaacaaagttttgttcgttggtacaaaacgtgctgcttctaacatcatccgtgaacaagctcaacgcgctggtcaaccatatgtagaccaccgttggttaggtggtatgttgacgaactggaaaacacttcgccaatctatcaaccgtttaaaagatcttcaaactcaatctcaagacggtacttttgctaagcttactaaacgtgaagctttagaacgtactcgtgagatggaaaaacttgagcgctctttaggcggcgttaaaaacatgggtggtttacctgacgcattatttgtaatcgacgttgatcacgaagcgattgcaattaaagaagctaagaacttaggtattcctgttatcggtatcgttgatacaaactctaacccagataacgttgattacgttattcctggtaacgacgatgcgatccgtgcagtaactttatatgcttcagctatggctgatgcaattcttgctggtaaagaatacgctcaatctcaagcgaacgctcaagcaaaaggcgatgacgctgcgaaagacgcttctgaggcttaatgcgttttgactgactttatcaggtatatcatgaccgaatcttttgcagccctctttgaagaaagtgaattaaacctcaacgttgaaaagggtgcagtcatccaaggtgttgttgtaaacatcgatagcgactgggttactgttgacactggccttaaatcagaaggcattgttgaccgtgctgaatttttaaatgaacaacgtgaacttgaagttcaggttggtgacactgttgacgtagttgttgaagctcttgacaacggtatgggtcaaacagttttatcacgtgaaaaagctaaacgtgctgaaacttggactaaacttgaaaaaatctttgaagatggcgaaatcgttactggtgttatctctggtaaagttaaaggcggtttcactgttgacatcggtcctgttcgtgcgttcttaccaggttcattagttgacactcgtcctatccgtgacactactcaccttgaaggtaaagagttagagtttaaagtaatcaaacttgatgctaaacgtaacaacgttgttgtatctcgtcgtgctgttatggaagctgaatcttctgctgaccgtgaagcattacttgctcaacttgaagaaggtcaaacagttacaggtactatcaagaaccttactgattacggtgcattcgttgatcttggcggtattgatggtcttcttcatatcacagatatggcttggaagcgtatcaagcacccttcagaagttgttgaagttggtcaagaagttactgttaaagtacttaaatttgaccgtgaacgtaaccgcgtatctttaggccttaaacaattaggcgaagatccatggttagcgatcatgagccgttaccctaaaggttctatcgttaaagcacgtgttactaacttaactgactacggttgtttcgctgaaatcgctgaaggcgttgaaggtttagtacacgtttctgaaatggaccacactaacaaaaacatccacccatctaaagttgttcagatcggtgacgaagttgatgttatggttcttgaagttgacgaagaacgtcgtcgtatcagccttggtatcaaacaaactcgtgctaacccatgggaagagtttgctaagtctcatgagaaaggcgaaaaagtttcaggcacaatcaagtctatcactgactttggtatcttcattggtttaaatggcggtatcgacggtctagttcacttgtctgatatttcttggaacgaacaaggcgaagaagctatccgtcgttacaagaaaggtgacactgttgaagcagttatcttgtctgtagacgctgaaggtaaccgtatcagccttggtatcaagcaattgaacagcgatccgttcaatgatttcttagctgctaacgaacgtggtgctttagttaaaggtactgtgactgcagttgatgctcgtggcgcaactgttaagttagctgacgaagtagaagctactcttaaagcttctgaaatcaaccgtgaccgcgttgaagatgcaactaaattcttagaagttggtcaagaagttgaagctaaaatcatcaacgttgatcgtaaatctcgctctatcaacttgtctatcaaagcgaaagacgaagctgaagagaaagaagcagtagctaacttacgtacagcatcagcttctcaagaaaatggtcctaagactattggtgacttgatcaaagcgcaaatgaagtaataagttaaacttaattaacggcactcctcagccaagtcaaaagcctccggtcggaggcttttgactacatgcccatggcgtttacgccccgccctgccactcatcgcagtactgttgtaattcattaagcattctgccgacatggaagccatcacaaacggcatgatgaacctgaatcgccagcggcatcagcaccttgtcgccttgcgtataatatttgcccatagtgaaaacgggggcgaagaagttgtccatattggccacgtttaaatcaaaactggtgaaactcacccagggattggctgagacgaaaaacatattctcaataaaccctttagggaaataggccaggttttcaccgtaacacgccacatcttgcgaatatatgtgtagaaactgccggaaatcgtcgtggtattcactccagagcgatgaaaacgtttcagtttgctcatggaaaacggtgtaacaagggtgaacactatcccatatcaccagctcaccgtctttcattgccatacggaactccggatgagcattcatcaggcgggcaagaatgtgaataaaggccggataaaacttgtgcttatttttctttacggtctttaaaaaggccgtaatatccagctgaacggtctggttataggtacattgagcaactgactgaaatgcctcaaaatgttctttacgatgccattgggatatatcaacggtggtatatccagtgatttttttctccattttagcttccttagctcctgaaaatctcgataactcaaaaaatacgcccggtagtgatcttatttcattatggtgaaagttggaacctcttacgtgccaagccaaataggccgt

SEQ ID NO: 325 - DNA, 6827 bp, Artificial
  Synthetic
tcagatccttccgtatttagccagtatgttctctagtgtggttcgttgtttttgcgtgagccatgagaacgaaccattgagatcatgcttactttgcatgtcactcaaaaattttgcctcaaaactggtgagctgaatttttgcagttaaagcatcgtgtagtgtttttcttagtccgttacgtaggtaggaatctgatgtaatggttgttggtattttgtcaccattcatttttatctggttgttctcaagttcggttacgagatccatttgtctatctagttcaacttggaaaatcaacgtatcagtcgggcggcctcgcttatcaaccaccaatttcatattgctgtaagtgtttaaatctttacttattggtttcaaaacccattggttaagccttttaaactcatggtagttattttcaagcattaacatgaacttaaattcatcaaggctaatctctatatttgccttgtgagttttcttttgtgttagttcttttaataaccactcataaatcctcatagagtatttgttttcaaaagacttaacatgttccagattatattttatgaatttttttaactggaaaagataaggcaatatctcttcactaaaaactaattctaatttttcgcttgagaacttggcatagtttgtccactggaaaatctcaaagcctttaaccaaaggattcctgatttccacagttctcgtcatcagctctctggttgctttagctaatacaccataagcattttccctactgatgttcatcatctgagcgtattggttataagtgaacgataccgtccgttctttccttgtagggttttcaatcgtggggttgagtagtgccacacagcataaaattagcttggtttcatgctccgttaagtcatagcgactaatcgctagttcatttgctttgaaaacaactaattcagacatacatctcaattggtctaggtgattttaatcactataccaattgagatgggctagtcaatgataattactagtccttttcctttgagttgtgggtatctgtaaattctgctagacctttgctggaaaacttgtaaattctgctagaccctctgtaaattccgctagacctttgtgtgttttttttgtttatattcaagtggttataatttatagaataaagaaagaataaaaaaagataaaaagaatagatcccagccctgtgtataactcactactttagtcagttccgcagtattacaaaaggatgtcgcaaacgctgtttgctcctctacaaaacagaccttaaaaccctaaaggcttaagtagcaccctcgcaagctcgggcaaatcgctgaatattccttttgtctccgaccatcaggcacctgagtcgctgtctttttcgtgacattcagttcgctgcgctcacggctctggcagtgaatgggggtaaatggcactacaggcgccttttatggattcatgcaaggaaactacccataatacaagaaaagcccgtcacgggcttctcagggcgttttatggcgggtctgctatgtggtgctatctgactttttgctgttcagcagttcctgccctctgattttccagtctgaccacttcggattatcccgtgacaggtcattcagactggctaatgcacccagtaaggcagcggtatcatcaacaggcttacccgtcttactgtcaagaggacatccggtcaaataaaacgaaaggctcagtcgaaagactgggcctttcgttttgctgaggagacttagggaccctttatgacaacttgacggctacatcattcactttttcttcacaaccggcacggaactcgctcgggctggccccggtgcattttttaaatacccgcgagaaatagagttgatcgtcaaaaccaacattgcgaccgacggtggcgataggcatccgggtggtgctcaaaagcagcttcgcctggctgatacgttggtcctcgcgccagcttaagacgctaatccctaactgctggcggaaaagatgtgacagacgcgacggcgacaagcaaacatgctgtgcgacgctggcgatatcaaaattgctgtctgccaggtgatcgctgatgtactgacaagcctcgcgtacccgattatccatcggtggatggagcgactcgttaatcgcttccatgcgccgcagtaacaattgctcaagcagatttatcgccagcagctccgaatagcgcccttccccttgcccggcgttaatgatttgcccaaacaggtcgctgaaatgcggctggtgcgcttcatccgggcgaaagaaccccgtattggcaaatattgacggccagttaagccattcatgccagtaggcgcgcggacgaaagtaaacccactggtgataccattcgcgagcctccggatgacgaccgtagtgatgaatctctcctggcgggaacagcaaaatatcacccggtcggcaaacaaattctcgtccctgatttttcaccaccccctgaccgcgaatggtgagattgagaatataacctttcattcccagcggtcggtcgataaaaaaatcgagataaccgttggcctcaatcggcgttaaacccgccaccagatgggcattaaacgagtatcccggcagcaggggatcattttgcgcttcagccatacttttcatactcccaccattcagagaagaaaccaattgtccatattgcatcagacattgccgtcactgcgtcttttactggctcttctcgctaacccaaccggtaaccccgcttattaaaagcattctgtaacaaagcgggaccaaagccatgacaaaaacgcgtaacaaaagtgtctataatcacggcagaaaagtccacattgattatttgcacggcgtcacactttgctatgccatagcatttttatccataagattagcggatcctacctgacgctttttatcgcaactctctactgtttctccatacccgttttacctgcaggtgcagtaaaaccaaactggaggaaacacaacatggcagtaatttctatgaaacaattactagaagccggcgtacactttggtcaccaaactcgtcgctggaacccaaaaatgaagaaatatatcttcacagaaagaaacggtatctacatcattgacttacaaaaaacagtgaaattagtagatgcagcttacgattacatgaaaaacgttgcagaagaaggcggcgttgctttattcgtaggaactaaaaaacaagcacaagaagcaatcaaagatgaagcaatccgcgctggtcaatactatgtaaaccatcgttggttaggtggtacgttaactaactgggatacaatccaaaaacgtattgctcgcttgaaaaaaatcaatgcaatggaagaagacggcactttcgaagttttacctaagaaagaagttgctggcttaaacaaagaacgtgaacgtttagaaaaattcttaggtggtatcgctgatatgccaagaattccagatgtaatgtacatcgttgacccgcgtaaagaacgcattgctgttcaagaagcacacaaattaaacattcctatcgttgcaatggttgatacaaactgtgatcctgatgagatcgatgttgtaatcccttcaaatgatgatgcaatccgcgctgtgaaattaatcactgctaaaatggctgacgctttcatcgaaggtaaccaaggggaagaccaagcaactgaagagttattcgttgaagaaacaccagaagcaacttcaatcgaagaaatcgttgatgttgttgaaggaaacaacgaatcagctgaataataatgattacggagctgtctcaaagtcgcataaaggaggtaaatagttcaatggtcatgacagatccaattgcagattttctaactcgcattcgtaatgcgaacatggttaaacatgaaactttagaagtacctgcttcaaaaatcaaacgtgatatcgcagaaatcctgaaacgtgaaggatttatccgcgacgtagaatacatcgaagatgacaaacaaggcgtaatccgtgttttcctaaaatatggtaaaaacgaagaacgtgttatcacaaacttaaaacgtatttctaaaccaggtttacgtgcatacgtaaaagctgacgaagtaccaaaagtattaaacggtctaggaattgcaatcatctctacatcagagggtgtaattactgacaaagaagctagagcgaaaaatatcggcggcgaagtaatcgcctacgtatggtaattctaaaaaatacacaaggaggtgtacgaatttgataggagggaacaagaatggcacaacaaagaagaggcggacgtaaacgtcggaaagtcgactatatcgcagcaaaccacatcgaatacatcgactataaagatactgaattgttaaaacgattcatttcagaacgtggcaaaattttaccacgtcgtgttacaggtactggcgctaaaaaccaacgtaaattaacgattgctattaaacgcgcacgtatcatgggattattaccattcgttagtgacgaacaataattttatgacaatttccagaaccaaaaagtaaggaaggaggagaacaaggaatgcctacaattaaccaattagtacgtaaacctcgtaaatctaaagtagaaaaatctgattcaccagccttaaacaaaggatataacagttttaagaaaactcaaacaaacgttaactctccgcaaaaacgtggagtttgtacacgtgtgggtacgatgacacctaaaaaaccgaactcagctttacgtaaatatgcccgtgttcgtttgtcaaacttaatcgaagttacagcttatatcccaggtatcggtcacaacttacaagaacacagcgtggtattattacgtggtggacgtgtaaaagacttaccaggggtacgttaccatatcgttcgtggtgcgcttgatactgccggtgttaacgaccgtaaacaaagccgctctaaatacggtacaaaacgtcctaaagcttaattataataagacaataacaacttgaacctaaatcatcggaggtgaaacaaatgccaaatatcgaatctgcaatcaaacgcgtacgtacaagtgctaacgcgaatgcgaaaaattcatctcaaacaaacgcaatgcgtacagcaatcaagaaatttgaagaagctgtagctgctggagctgataacgtcgatgctttatacaacgaagctgttaaagctgttgatatggctgcaactaaaggtttaatccataaaaacaaagctaaccgcgataaaattcgtttaagcaaattagctaaataatgtgagatagaagttagcattcatgtaagttaatggaggtgtatttaataatggcagttaaaattcgtttaaaacgtatgggttctaaaaagagtcctttttaccgtattgtagtagctgattctcgttctcctcgtgatggacgtttcatcgaaactgtaggtacttacaaccctttgaaagaccctgcagaagtagttttaaaagaagatttagttttagattggttatctaaaggtgcgcaaccttctgatacagttcgtaacatcctttcaaaagaaggcgttatgaaaaaacatcatgaagctaaaaacgttaagaaataaggtgattgaacatggcagatgtgaaaatagtggaaggaggccaaacgcgtatgactgaagaaagaaatcaacgtaaagtttaccaaggtcgcgtggtatcagacaaaatggataaaacaatcacagttgtcgttgaaacaaagaaaaaccaccctatctatggcaaacgtatgaaatattctaaaaaatataaagcgcatgatgaaaacaacacagcgaaagttggagacatcgtaaaaatcatggaaactcgtccattatcagctacaaaacgtttccgtttactagaggtagtcgaagaagcagttattatctaataaaacgagaatttcctaatagattacttaattaacggcactcctcagccaagtcaaaagcctccggtcggaggcttttgactacatgcccatggcgtttacgccccgccctgccactcatcgcagtactgttgtaattcattaagcattctgccgacatggaagccatcacaaacggcatgatgaacctgaatcgccagcggcatcagcaccttgtcgccttgcgtataatatttgcccatagtgaaaacgggggcgaagaagttgtccatattggccacgtttaaatcaaaactggtgaaactcacccagggattggctgagacgaaaaacatattctcaataaaccctttagggaaataggccaggttttcaccgtaacacgccacatcttgcgaatatatgtgtagaaactgccggaaatcgtcgtggtattcactccagagcgatgaaaacgtttcagtttgctcatggaaaacggtgtaacaagggtgaacactatcccatatcaccagctcaccgtctttcattgccatacggaactccggatgagcattcatcaggcgggcaagaatgtgaataaaggccggataaaacttgtgcttatttttctttacggtctttaaaaaggccgtaatatccagctgaacggtctggttataggtacattgagcaactgactgaaatgcctcaaaatgttctttacgatgccattgggatatatcaacggtggtatatccagtgatttttttctccattttagcttccttagctcctgaaaatctcgataactcaaaaaatacgcccggtagtgatcttatttcattatggtgaaagttggaacctcttacgtgccaagccaaataggccgt

SEQ ID NO: 326 - DNA, 4449 bp, Artificial
  Synthetic
tcagatccttccgtatttagccagtatgttctctagtgtggttcgttgtttttgcgtgagccatgagaacgaaccattgagatcatgcttactttgcatgtcactcaaaaattttgcctcaaaactggtgagctgaatttttgcagttaaagcatcgtgtagtgtttttcttagtccgttacgtaggtaggaatctgatgtaatggttgttggtattttgtcaccattcatttttatctggttgttctcaagttcggttacgagatccatttgtctatctagttcaacttggaaaatcaacgtatcagtcgggcggcctcgcttatcaaccaccaatttcatattgctgtaagtgtttaaatctttacttattggtttcaaaacccattggttaagccttttaaactcatggtagttattttcaagcattaacatgaacttaaattcatcaaggctaatctctatatttgccttgtgagttttcttttgtgttagttcttttaataaccactcataaatcctcatagagtatttgttttcaaaagacttaacatgttccagattatattttatgaatttttttaactggaaaagataaggcaatatctcttcactaaaaactaattctaatttttcgcttgagaacttggcatagtttgtccactggaaaatctcaaagcctttaaccaaaggattcctgatttccacagttctcgtcatcagctctctggttgctttagctaatacaccataagcattttccctactgatgttcatcatctgagcgtattggttataagtgaacgataccgtccgttctttccttgtagggttttcaatcgtggggttgagtagtgccacacagcataaaattagcttggtttcatgctccgttaagtcatagcgactaatcgctagttcatttgctttgaaaacaactaattcagacatacatctcaattggtctaggtgattttaatcactataccaattgagatgggctagtcaatgataattactagtccttttcctttgagttgtgggtatctgtaaattctgctagacctttgctggaaaacttgtaaattctgctagaccctctgtaaattccgctagacctttgtgtgttttttttgtttatattcaagtggttataatttatagaataaagaaagaataaaaaaagataaaaagaatagatcccagccctgtgtataactcactactttagtcagttccgcagtattacaaaaggatgtcgcaaacgctgtttgctcctctacaaaacagaccttaaaaccctaaaggcttaagtagcaccctcgcaagctcgggcaaatcgctgaatattccttttgtctccgaccatcaggcacctgagtcgctgtctttttcgtgacattcagttcgctgcgctcacggctctggcagtgaatgggggtaaatggcactacaggcgccttttatggattcatgcaaggaaactacccataatacaagaaaagcccgtcacgggcttctcagggcgttttatggcgggtctgctatgtggtgctatctgactttttgctgttcagcagttcctgccctctgattttccagtctgaccacttcggattatcccgtgacaggtcattcagactggctaatgcacccagtaaggcagcggtatcatcaacaggcttacccgtcttactgtcaagaggacatccggtcaaataaaacgaaaggctcagtcgaaagactgggcctttcgttttgctgaggagacttagggaccctttatgacaacttgacggctacatcattcactttttcttcacaaccggcacggaactcgctcgggctggccccggtgcattttttaaatacccgcgagaaatagagttgatcgtcaaaaccaacattgcgaccgacggtggcgataggcatccgggtggtgctcaaaagcagcttcgcctggctgatacgttggtcctcgcgccagcttaagacgctaatccctaactgctggcggaaaagatgtgacagacgcgacggcgacaagcaaacatgctgtgcgacgctggcgatatcaaaattgctgtctgccaggtgatcgctgatgtactgacaagcctcgcgtacccgattatccatcggtggatggagcgactcgttaatcgcttccatgcgccgcagtaacaattgctcaagcagatttatcgccagcagctccgaatagcgcccttccccttgcccggcgttaatgatttgcccaaacaggtcgctgaaatgcggctggtgcgcttcatccgggcgaaagaaccccgtattggcaaatattgacggccagttaagccattcatgccagtaggcgcgcggacgaaagtaaacccactggtgataccattcgcgagcctccggatgacgaccgtagtgatgaatctctcctggcgggaacagcaaaatatcacccggtcggcaaacaaattctcgtccctgatttttcaccaccccctgaccgcgaatggtgagattgagaatataacctttcattcccagcggtcggtcgataaaaaaatcgagataaccgttggcctcaatcggcgttaaacccgccaccagatgggcattaaacgagtatcccggcagcaggggatcattttgcgcttcagccatacttttcatactcccaccattcagagaagaaaccaattgtccatattgcatcagacattgccgtcactgcgtcttttactggctcttctcgctaacccaaccggtaaccccgcttattaaaagcattctgtaacaaagcgggaccaaagccatgacaaaaacgcgtaacaaaagtgtctataatcacggcagaaaagtccacattgattatttgcacggcgtcacactttgctatgccatagcatttttatccataagattagcggatcctacctgacgctttttatcgcaactctctactgtttctccatacccgttttacctgcaggtgcagtaatcatcggaggtgaaacaaatgccaaatatcgaatctgcaatcaaacgcgtacgtacaagtgctaacgcgaatgcgaaaaattcatctcaaacaaacgcaatgcgtacagcaatcaagaaatttgaagaagctgtagctgctggagctgataacgtcgatgctttatacaacgaagctgttaaagctgttgatatggctgcaactaaaggtttaatccataaaaacaaagctaaccgcgataaaattcgtttaagcaaattagctaaataatgtgagatagaagttagcattcatgtaagttaatggaggtgtatttaataatggcagttaaaattcgtttaaaacgtatgggttctaaaaagagtcctttttaccgtattgtagtagctgattctcgttctcctcgtgatggacgtttcatcgaaactgtaggtacttacaaccctttgaaagaccctgcagaagtagttttaaaagaagatttagttttagattggttatctaaaggtgcgcaaccttctgatacagttcgtaacatcctttcaaaagaaggcgttatgaaaaaacatcatgaagctaaaaacgttaagaaataaggtgattgacttaattaacggcactcctcagccaagtcaaaagcctccggtcggaggcttttgactacatgcccatggcgtttacgccccgccctgccactcatcgcagtactgttgtaattcattaagcattctgccgacatggaagccatcacaaacggcatgatgaacctgaatcgccagcggcatcagcaccttgtcgccttgcgtataatatttgcccatagtgaaaacgggggcgaagaagttgtccatattggccacgtttaaatcaaaactggtgaaactcacccagggattggctgagacgaaaaacatattctcaataaaccctttagggaaataggccaggttttcaccgtaacacgccacatcttgcgaatatatgtgtagaaactgccggaaatcgtcgtggtattcactccagagcgatgaaaacgtttcagtttgctcatggaaaacggtgtaacaagggtgaacactatcccatatcaccagctcaccgtctttcattgccatacggaactccggatgagcattcatcaggcgggcaagaatgtgaataaaggccggataaaacttgtgcttatttttctttacggtctttaaaaaggccgtaatatccagctgaacggtctggttataggtacattgagcaactgactgaaatgcctcaaaatgttctttacgatgccattgggatatatcaacggtggtatatccagtgatttttttctccattttagcttccttagctcctgaaaatctcgataactcaaaaaatacgcccggtagtgatcttatttcattatggtgaaagttggaacctcttacgtgccaagccaaataggccgt

SEQ ID NO: 327 - DNA, 6088 bp, Artificial
  Synthetic
tcagatccttccgtatttagccagtatgttctctagtgtggttcgttgtttttgcgtgagccatgagaacgaaccattgagatcatgcttactttgcatgtcactcaaaaattttgcctcaaaactggtgagctgaatttttgcagttaaagcatcgtgtagtgtttttcttagtccgttacgtaggtaggaatctgatgtaatggttgttggtattttgtcaccattcatttttatctggttgttctcaagttcggttacgagatccatttgtctatctagttcaacttggaaaatcaacgtatcagtcgggcggcctcgcttatcaaccaccaatttcatattgctgtaagtgtttaaatctttacttattggtttcaaaacccattggttaagccttttaaactcatggtagttattttcaagcattaacatgaacttaaattcatcaaggctaatctctatatttgccttgtgagttttcttttgtgttagttcttttaataaccactcataaatcctcatagagtatttgttttcaaaagacttaacatgttccagattatattttatgaatttttttaactggaaaagataaggcaatatctcttcactaaaaactaattctaatttttcgcttgagaacttggcatagtttgtccactggaaaatctcaaagcctttaaccaaaggattcctgatttccacagttctcgtcatcagctctctggttgctttagctaatacaccataagcattttccctactgatgttcatcatctgagcgtattggttataagtgaacgataccgtccgttctttccttgtagggttttcaatcgtggggttgagtagtgccacacagcataaaattagcttggtttcatgctccgttaagtcatagcgactaatcgctagttcatttgctttgaaaacaactaattcagacatacatctcaattggtctaggtgattttaatcactataccaattgagatgggctagtcaatgataattactagtccttttcctttgagttgtgggtatctgtaaattctgctagacctttgctggaaaacttgtaaattctgctagaccctctgtaaattccgctagacctttgtgtgttttttttgtttatattcaagtggttataatttatagaataaagaaagaataaaaaaagataaaaagaatagatcccagccctgtgtataactcactactttagtcagttccgcagtattacaaaaggatgtcgcaaacgctgtttgctcctctacaaaacagaccttaaaaccctaaaggcttaagtagcaccctcgcaagctcgggcaaatcgctgaatattccttttgtctccgaccatcaggcacctgagtcgctgtctttttcgtgacattcagttcgctgcgctcacggctctggcagtgaatgggggtaaatggcactacaggcgccttttatggattcatgcaaggaaactacccataatacaagaaaagcccgtcacgggcttctcagggcgttttatggcgggtctgctatgtggtgctatctgactttttgctgttcagcagttcctgccctctgattttccagtctgaccacttcggattatcccgtgacaggtcattcagactggctaatgcacccagtaaggcagcggtatcatcaacaggcttacccgtcttactgtcaagaggacatccggtcaaataaaacgaaaggctcagtcgaaagactgggcctttcgttttgctgaggagacttagggaccctttatgacaacttgacggctacatcattcactttttcttcacaaccggcacggaactcgctcgggctggccccggtgcattttttaaatacccgcgagaaatagagttgatcgtcaaaaccaacattgcgaccgacggtggcgataggcatccgggtggtgctcaaaagcagcttcgcctggctgatacgttggtcctcgcgccagcttaagacgctaatccctaactgctggcggaaaagatgtgacagacgcgacggcgacaagcaaacatgctgtgcgacgctggcgatatcaaaattgctgtctgccaggtgatcgctgatgtactgacaagcctcgcgtacccgattatccatcggtggatggagcgactcgttaatcgcttccatgcgccgcagtaacaattgctcaagcagatttatcgccagcagctccgaatagcgcccttccccttgcccggcgttaatgatttgcccaaacaggtcgctgaaatgcggctggtgcgcttcatccgggcgaaagaaccccgtattggcaaatattgacggccagttaagccattcatgccagtaggcgcgcggacgaaagtaaacccactggtgataccattcgcgagcctccggatgacgaccgtagtgatgaatctctcctggcgggaacagcaaaatatcacccggtcggcaaacaaattctcgtccctgatttttcaccaccccctgaccgcgaatggtgagattgagaatataacctttcattcccagcggtcggtcgataaaaaaatcgagataaccgttggcctcaatcggcgttaaacccgccaccagatgggcattaaacgagtatcccggcagcaggggatcattttgcgcttcagccatacttttcatactcccaccattcagagaagaaaccaattgtccatattgcatcagacattgccgtcactgcgtcttttactggctcttctcgctaacccaaccggtaaccccgcttattaaaagcattctgtaacaaagcgggaccaaagccatgacaaaaacgcgtaacaaaagtgtctataatcacggcagaaaagtccacattgattatttgcacggcgtcacactttgctatgccatagcatttttatccataagattagcggatcctacctgacgctttttatcgcaactctctactgtttctccatacccgttttacctgcaggtgcagtaaaaccaaactggaggaaacacaacatggcagtaatttctatgaaacaattactagaagccggcgtacactttggtcaccaaactcgtcgctggaacccaaaaatgaagaaatatatcttcacagaaagaaacggtatctacatcattgacttacaaaaaacagtgaaattagtagatgcagcttacgattacatgaaaaacgttgcagaagaaggcggcgttgctttattcgtaggaactaaaaaacaagcacaagaagcaatcaaagatgaagcaatccgcgctggtcaatactatgtaaaccatcgttggttaggtggtacgttaactaactgggatacaatccaaaaacgtattgctcgcttgaaaaaaatcaatgcaatggaagaagacggcactttcgaagttttacctaagaaagaagttgctggcttaaacaaagaacgtgaacgtttagaaaaattcttaggtggtatcgctgatatgccaagaattccagatgtaatgtacatcgttgacccgcgtaaagaacgcattgctgttcaagaagcacacaaattaaacattcctatcgttgcaatggttgatacaaactgtgatcctgatgagatcgatgttgtaatcccttcaaatgatgatgcaatccgcgctgtgaaattaatcactgctaaaatggctgacgctttcatcgaaggtaaccaaggggaagaccaagcaactgaagagttattcgttgaagaaacaccagaagcaacttcaatcgaagaaatcgttgatgttgttgaaggaaacaacgaatcagctgaataataatgattacggagctgtctcaaagaagtaaggaaggaggagaacaaggaatgcctacaattaaccaattagtacgtaaacctcgtaaatctaaagtagaaaaatctgattcaccagccttaaacaaaggatataacagttttaagaaaactcaaacaaacgttaactctccgcaaaaacgtggagtttgtacacgtgtgggtacgatgacacctaaaaaaccgaactcagctttacgtaaatatgcccgtgttcgtttgtcaaacttaatcgaagttacagcttatatcccaggtatcggtcacaacttacaagaacacagcgtggtattattacgtggtggacgtgtaaaagacttaccaggggtacgttaccatatcgttcgtggtgcgcttgatactgccggtgttaacgaccgtaaacaaagccgctctaaatacggtacaaaacgtcctaaagcttaattataataagacaataacaacttgaacctaaatcatcggaggtgaaacaaatgccaaatatcgaatctgcaatcaaacgcgtacgtacaagtgctaacgcgaatgcgaaaaattcatctcaaacaaacgcaatgcgtacagcaatcaagaaatttgaagaagctgtagctgctggagctgataacgtcgatgctttatacaacgaagctgttaaagctgttgatatggctgcaactaaaggtttaatccataaaaacaaagctaaccgcgataaaattcgtttaagcaaattagctaaataatgtgagatagaagttagcattcatgtaagttaatggaggtgtatttaataatggcagttaaaattcgtttaaaacgtatgggttctaaaaagagtcctttttaccgtattgtagtagctgattctcgttctcctcgtgatggacgtttcatcgaaactgtaggtacttacaaccctttgaaagaccctgcagaagtagttttaaaagaagatttagttttagattggttatctaaaggtgcgcaaccttctgatacagttcgtaacatcctttcaaaagaaggcgttatgaaaaaacatcatgaagctaaaaacgttaagaaataaggtgattgaacatggcagatgtgaaaatagtggaaggaggccaaacgcgtatgactgaagaaagaaatcaacgtaaagtttaccaaggtcgcgtggtatcagacaaaatggataaaacaatcacagttgtcgttgaaacaaagaaaaaccaccctatctatggcaaacgtatgaaatattctaaaaaatataaagcgcatgatgaaaacaacacagcgaaagttggagacatcgtaaaaatcatggaaactcgtccattatcagctacaaaacgtttccgtttactagaggtagtcgaagaagcagttattatctaataaaacgagaatttcctaatagattacttaattaacggcactcctcagccaagtcaaaagcctccggtcggaggcttttgactacatgcccatggcgtttacgccccgccctgccactcatcgcagtactgttgtaattcattaagcattctgccgacatggaagccatcacaaacggcatgatgaacctgaatcgccagcggcatcagcaccttgtcgccttgcgtataatatttgcccatagtgaaaacgggggcgaagaagttgtccatattggccacgtttaaatcaaaactggtgaaactcacccagggattggctgagacgaaaaacatattctcaataaaccctttagggaaataggccaggttttcaccgtaacacgccacatcttgcgaatatatgtgtagaaactgccggaaatcgtcgtggtattcactccagagcgatgaaaacgtttcagtttgctcatggaaaacggtgtaacaagggtgaacactatcccatatcaccagctcaccgtctttcattgccatacggaactccggatgagcattcatcaggcgggcaagaatgtgaataaaggccggataaaacttgtgcttatttttctttacggtctttaaaaaggccgtaatatccagctgaacggtctggttataggtacattgagcaactgactgaaatgcctcaaaatgttctttacgatgccattgggatatatcaacggtggtatatccagtgatttttttctccattttagcttccttagctcctgaaaatctcgataactcaaaaaatacgcccggtagtgatcttatttcattatggtgaaagttggaacctcttacgtgccaagccaaataggccgt

SEQ ID NO: 328 - DNA, 6510 bp, Artificial
  Synthetic
tcagatccttccgtatttagccagtatgttctctagtgtggttcgttgtttttgcgtgagccatgagaacgaaccattgagatcatgcttactttgcatgtcactcaaaaattttgcctcaaaactggtgagctgaatttttgcagttaaagcatcgtgtagtgtttttcttagtccgttacgtaggtaggaatctgatgtaatggttgttggtattttgtcaccattcatttttatctggttgttctcaagttcggttacgagatccatttgtctatctagttcaacttggaaaatcaacgtatcagtcgggcggcctcgcttatcaaccaccaatttcatattgctgtaagtgtttaaatctttacttattggtttcaaaacccattggttaagccttttaaactcatggtagttattttcaagcattaacatgaacttaaattcatcaaggctaatctctatatttgccttgtgagttttcttttgtgttagttcttttaataaccactcataaatcctcatagagtatttgttttcaaaagacttaacatgttccagattatattttatgaatttttttaactggaaaagataaggcaatatctcttcactaaaaactaattctaatttttcgcttgagaacttggcatagtttgtccactggaaaatctcaaagcctttaaccaaaggattcctgatttccacagttctcgtcatcagctctctggttgctttagctaatacaccataagcattttccctactgatgttcatcatctgagcgtattggttataagtgaacgataccgtccgttctttccttgtagggttttcaatcgtggggttgagtagtgccacacagcataaaattagcttggtttcatgctccgttaagtcatagcgactaatcgctagttcatttgctttgaaaacaactaattcagacatacatctcaattggtctaggtgattttaatcactataccaattgagatgggctagtcaatgataattactagtccttttcctttgagttgtgggtatctgtaaattctgctagacctttgctggaaaacttgtaaattctgctagaccctctgtaaattccgctagacctttgtgtgttttttttgtttatattcaagtggttataatttatagaataaagaaagaataaaaaaagataaaaagaatagatcccagccctgtgtataactcactactttagtcagttccgcagtattacaaaaggatgtcgcaaacgctgtttgctcctctacaaaacagaccttaaaaccctaaaggcttaagtagcaccctcgcaagctcgggcaaatcgctgaatattccttttgtctccgaccatcaggcacctgagtcgctgtctttttcgtgacattcagttcgctgcgctcacggctctggcagtgaatgggggtaaatggcactacaggcgccttttatggattcatgcaaggaaactacccataatacaagaaaagcccgtcacgggcttctcagggcgttttatggcgggtctgctatgtggtgctatctgactttttgctgttcagcagttcctgccctctgattttccagtctgaccacttcggattatcccgtgacaggtcattcagactggctaatgcacccagtaaggcagcggtatcatcaacaggcttacccgtcttactgtcaagaggacatccggtcaaataaaacgaaaggctcagtcgaaagactgggcctttcgttttgctgaggagacttagggaccctttatgacaacttgacggctacatcattcactttttcttcacaaccggcacggaactcgctcgggctggccccggtgcattttttaaatacccgcgagaaatagagttgatcgtcaaaaccaacattgcgaccgacggtggcgataggcatccgggtggtgctcaaaagcagcttcgcctggctgatacgttggtcctcgcgccagcttaagacgctaatccctaactgctggcggaaaagatgtgacagacgcgacggcgacaagcaaacatgctgtgcgacgctggcgatatcaaaattgctgtctgccaggtgatcgctgatgtactgacaagcctcgcgtacccgattatccatcggtggatggagcgactcgttaatcgcttccatgcgccgcagtaacaattgctcaagcagatttatcgccagcagctccgaatagcgcccttccccttgcccggcgttaatgatttgcccaaacaggtcgctgaaatgcggctggtgcgcttcatccgggcgaaagaaccccgtattggcaaatattgacggccagttaagccattcatgccagtaggcgcgcggacgaaagtaaacccactggtgataccattcgcgagcctccggatgacgaccgtagtgatgaatctctcctggcgggaacagcaaaatatcacccggtcggcaaacaaattctcgtccctgatttttcaccaccccctgaccgcgaatggtgagattgagaatataacctttcattcccagcggtcggtcgataaaaaaatcgagataaccgttggcctcaatcggcgttaaacccgccaccagatgggcattaaacgagtatcccggcagcaggggatcattttgcgcttcagccatacttttcatactcccaccattcagagaagaaaccaattgtccatattgcatcagacattgccgtcactgcgtcttttactggctcttctcgctaacccaaccggtaaccccgcttattaaaagcattctgtaacaaagcgggaccaaagccatgacaaaaacgcgtaacaaaagtgtctataatcacggcagaaaagtccacattgattatttgcacggcgtcacactttgctatgccatagcatttttatccataagattagcggatcctacctgacgctttttatcgcaactctctactgtttctccatacccgttttacctgcaggtgcagtaaaaccaaactggaggaaacacaacatggcagtaatttctatgaaacaattactagaagccggcgtacactttggtcaccaaactcgtcgctggaacccaaaaatgaagaaatatatcttcacagaaagaaacggtatctacatcattgacttacaaaaaacagtgaaattagtagatgcagcttacgattacatgaaaaacgttgcagaagaaggcggcgttgctttattcgtaggaactaaaaaacaagcacaagaagcaatcaaagatgaagcaatccgcgctggtcaatactatgtaaaccatcgttggttaggtggtacgttaactaactgggatacaatccaaaaacgtattgctcgcttgaaaaaaatcaatgcaatggaagaagacggcactttcgaagttttacctaagaaagaagttgctggcttaaacaaagaacgtgaacgtttagaaaaattcttaggtggtatcgctgatatgccaagaattccagatgtaatgtacatcgttgacccgcgtaaagaacgcattgctgttcaagaagcacacaaattaaacattcctatcgttgcaatggttgatacaaactgtgatcctgatgagatcgatgttgtaatcccttcaaatgatgatgcaatccgcgctgtgaaattaatcactgctaaaatggctgacgctttcatcgaaggtaaccaaggggaagaccaagcaactgaagagttattcgttgaagaaacaccagaagcaacttcaatcgaagaaatcgttgatgttgttgaaggaaacaacgaatcagctgaataataatgattacggagctgtctcaaagtcgcataaaggaggtaaatagttcaatggtcatgacagatccaattgcagattttctaactcgcattcgtaatgcgaacatggttaaacatgaaactttagaagtacctgcttcaaaaatcaaacgtgatatcgcagaaatcctgaaacgtgaaggatttatccgcgacgtagaatacatcgaagatgacaaacaaggcgtaatccgtgttttcctaaaatatggtaaaaacgaagaacgtgttatcacaaacttaaaacgtatttctaaaccaggtttacgtgcatacgtaaaagctgacgaagtaccaaaagtattaaacggtctaggaattgcaatcatctctacatcagagggtgtaattactgacaaagaagctagagcgaaaaatatcggcggcgaagtaatcgcctacgtatggtaattctaaaaaatacacaaggaggtgtacgaatttgataggagggaacaagaatggcacaacaaagaagaggcggacgtaaacgtcggaaagtcgactatatcgcagcaaaccacatcgaatacatcgactataaagatactgaattgttaaaacgattcatttcagaacgtggcaaaattttaccacgtcgtgttacaggtactggcgctaaaaaccaacgtaaattaacgattgctattaaacgcgcacgtatcatgggattattaccattcgttagtgacgaacaataattttatgacaatttccagaaccaaaaagtaaggaaggaggagaacaaggaatgcctacaattaaccaattagtacgtaaacctcgtaaatctaaagtagaaaaatctgattcaccagccttaaacaaaggatataacagttttaagaaaactcaaacaaacgttaactctccgcaaaaacgtggagtttgtacacgtgtgggtacgatgacacctaaaaaaccgaactcagctttacgtaaatatgcccgtgttcgtttgtcaaacttaatcgaagttacagcttatatcccaggtatcggtcacaacttacaagaacacagcgtggtattattacgtggtggacgtgtaaaagacttaccaggggtacgttaccatatcgttcgtggtgcgcttgatactgccggtgttaacgaccgtaaacaaagccgctctaaatacggtacaaaacgtcctaaagcttaattataataagacaataacaacttgaacctaaatcatcggaggtgaaacaaatgccaaatatcgaatctgcaatcaaacgcgtacgtacaagtgctaacgcgaatgcgaaaaattcatctcaaacaaacgcaatgcgtacagcaatcaagaaatttgaagaagctgtagctgctggagctgataacgtcgatgctttatacaacgaagctgttaaagctgttgatatggctgcaactaaaggtttaatccataaaaacaaagctaaccgcgataaaattcgtttaagcaaattagctaaataatgtgagatagaagttagcattcatgtaagttaatggaggtgtatttaataatggcagttaaaattcgtttaaaacgtatgggttctaaaaagagtcctttttaccgtattgtagtagctgattctcgttctcctcgtgatggacgtttcatcgaaactgtaggtacttacaaccctttgaaagaccctgcagaagtagttttaaaagaagatttagttttagattggttatctaaaggtgcgcaaccttctgatacagttcgtaacatcctttcaaaagaaggcgttatgaaaaaacatcatgaagctaaaaacgttaagaaataaggtgattgaacatggcagatgtgaaacttaattaacggcactcctcagccaagtcaaaagcctccggtcggaggcttttgactacatgcccatggcgtttacgccccgccctgccactcatcgcagtactgttgtaattcattaagcattctgccgacatggaagccatcacaaacggcatgatgaacctgaatcgccagcggcatcagcaccttgtcgccttgcgtataatatttgcccatagtgaaaacgggggcgaagaagttgtccatattggccacgtttaaatcaaaactggtgaaactcacccagggattggctgagacgaaaaacatattctcaataaaccctttagggaaataggccaggttttcaccgtaacacgccacatcttgcgaatatatgtgtagaaactgccggaaatcgtcgtggtattcactccagagcgatgaaaacgtttcagtttgctcatggaaaacggtgtaacaagggtgaacactatcccatatcaccagctcaccgtctttcattgccatacggaactccggatgagcattcatcaggcgggcaagaatgtgaataaaggccggataaaacttgtgcttatttttctttacggtctttaaaaaggccgtaatatccagctgaacggtctggttataggtacattgagcaactgactgaaatgcctcaaaatgttctttacgatgccattgggatatatcaacggtggtatatccagtgatttttttctccattttagcttccttagctcctgaaaatctcgataactcaaaaaatacgcccggtagtgatcttatttcattatggtgaaagttggaacctcttacgtgccaagccaaataggccgt

SEQ ID NO: 329 - DNA, 6501 bp, Artificial
  Synthetic
tcagatccttccgtatttagccagtatgttctctagtgtggttcgttgtttttgcgtgagccatgagaacgaaccattgagatcatgcttactttgcatgtcactcaaaaattttgcctcaaaactggtgagctgaatttttgcagttaaagcatcgtgtagtgtttttcttagtccgttacgtaggtaggaatctgatgtaatggttgttggtattttgtcaccattcatttttatctggttgttctcaagttcggttacgagatccatttgtctatctagttcaacttggaaaatcaacgtatcagtcgggcggcctcgcttatcaaccaccaatttcatattgctgtaagtgtttaaatctttacttattggtttcaaaacccattggttaagccttttaaactcatggtagttattttcaagcattaacatgaacttaaattcatcaaggctaatctctatatttgccttgtgagttttcttttgtgttagttcttttaataaccactcataaatcctcatagagtatttgttttcaaaagacttaacatgttccagattatattttatgaatttttttaactggaaaagataaggcaatatctcttcactaaaaactaattctaatttttcgcttgagaacttggcatagtttgtccactggaaaatctcaaagcctttaaccaaaggattcctgatttccacagttctcgtcatcagctctctggttgctttagctaatacaccataagcattttccctactgatgttcatcatctgagcgtattggttataagtgaacgataccgtccgttctttccttgtagggttttcaatcgtggggttgagtagtgccacacagcataaaattagcttggtttcatgctccgttaagtcatagcgactaatcgctagttcatttgctttgaaaacaactaattcagacatacatctcaattggtctaggtgattttaatcactataccaattgagatgggctagtcaatgataattactagtccttttcctttgagttgtgggtatctgtaaattctgctagacctttgctggaaaacttgtaaattctgctagaccctctgtaaattccgctagacctttgtgtgttttttttgtttatattcaagtggttataatttatagaataaagaaagaataaaaaaagataaaaagaatagatcccagccctgtgtataactcactactttagtcagttccgcagtattacaaaaggatgtcgcaaacgctgtttgctcctctacaaaacagaccttaaaaccctaaaggcttaagtagcaccctcgcaagctcgggcaaatcgctgaatattccttttgtctccgaccatcaggcacctgagtcgctgtctttttcgtgacattcagttcgctgcgctcacggctctggcagtgaatgggggtaaatggcactacaggcgccttttatggattcatgcaaggaaactacccataatacaagaaaagcccgtcacgggcttctcagggcgttttatggcgggtctgctatgtggtgctatctgactttttgctgttcagcagttcctgccctctgattttccagtctgaccacttcggattatcccgtgacaggtcattcagactggctaatgcacccagtaaggcagcggtatcatcaacaggcttacccgtcttactgtcaagaggacatccggtcaaataaaacgaaaggctcagtcgaaagactgggcctttcgttttgctgaggagacttagggaccctttatgacaacttgacggctacatcattcactttttcttcacaaccggcacggaactcgctcgggctggccccggtgcattttttaaatacccgcgagaaatagagttgatcgtcaaaaccaacattgcgaccgacggtggcgataggcatccgggtggtgctcaaaagcagcttcgcctggctgatacgttggtcctcgcgccagcttaagacgctaatccctaactgctggcggaaaagatgtgacagacgcgacggcgacaagcaaacatgctgtgcgacgctggcgatatcaaaattgctgtctgccaggtgatcgctgatgtactgacaagcctcgcgtacccgattatccatcggtggatggagcgactcgttaatcgcttccatgcgccgcagtaacaattgctcaagcagatttatcgccagcagctccgaatagcgcccttccccttgcccggcgttaatgatttgcccaaacaggtcgctgaaatgcggctggtgcgcttcatccgggcgaaagaaccccgtattggcaaatattgacggccagttaagccattcatgccagtaggcgcgcggacgaaagtaaacccactggtgataccattcgcgagcctccggatgacgaccgtagtgatgaatctctcctggcgggaacagcaaaatatcacccggtcggcaaacaaattctcgtccctgatttttcaccaccccctgaccgcgaatggtgagattgagaatataacctttcattcccagcggtcggtcgataaaaaaatcgagataaccgttggcctcaatcggcgttaaacccgccaccagatgggcattaaacgagtatcccggcagcaggggatcattttgcgcttcagccatacttttcatactcccaccattcagagaagaaaccaattgtccatattgcatcagacattgccgtcactgcgtcttttactggctcttctcgctaacccaaccggtaaccccgcttattaaaagcattctgtaacaaagcgggaccaaagccatgacaaaaacgcgtaacaaaagtgtctataatcacggcagaaaagtccacattgattatttgcacggcgtcacactttgctatgccatagcatttttatccataagattagcggatcctacctgacgctttttatcgcaactctctactgtttctccatacccgttttacctgcaggtgcagtaaaaccaaactggaggaaacacaacatggcagtaatttctatgaaacaattactagaagccggcgtacactttggtcaccaaactcgtcgctggaacccaaaaatgaagaaatatatcttcacagaaagaaacggtatctacatcattgacttacaaaaaacagtgaaattagtagatgcagcttacgattacatgaaaaacgttgcagaagaaggcggcgttgctttattcgtaggaactaaaaaacaagcacaagaagcaatcaaagatgaagcaatccgcgctggtcaatactatgtaaaccatcgttggttaggtggtacgttaactaactgggatacaatccaaaaacgtattgctcgcttgaaaaaaatcaatgcaatggaagaagacggcactttcgaagttttacctaagaaagaagttgctggcttaaacaaagaacgtgaacgtttagaaaaattcttaggtggtatcgctgatatgccaagaattccagatgtaatgtacatcgttgacccgcgtaaagaacgcattgctgttcaagaagcacacaaattaaacattcctatcgttgcaatggttgatacaaactgtgatcctgatgagatcgatgttgtaatcccttcaaatgatgatgcaatccgcgctgtgaaattaatcactgctaaaatggctgacgctttcatcgaaggtaaccaaggggaagaccaagcaactgaagagttattcgttgaagaaacaccagaagcaacttcaatcgaagaaatcgttgatgttgttgaaggaaacaacgaatcagctgaataataatgattacggagctgtctcaaagtcgcataaaggaggtaaatagttcaatggtcatgacagatccaattgcagattttctaactcgcattcgtaatgcgaacatggttaaacatgaaactttagaagtacctgcttcaaaaatcaaacgtgatatcgcagaaatcctgaaacgtgaaggatttatccgcgacgtagaatacatcgaagatgacaaacaaggcgtaatccgtgttttcctaaaatatggtaaaaacgaagaacgtgttatcacaaacttaaaacgtatttctaaaccaggtttacgtgcatacgtaaaagctgacgaagtaccaaaagtattaaacggtctaggaattgcaatcatctctacatcagagggtgtaattactgacaaagaagctagagcgaaaaatatcggcggcgaagtaatcgcctacgtatggtaattctaaaaaatacacaaggaggtgtacgaatttgataggagggaacaagaatggcacaacaaagaagaggcggacgtaaacgtcggaaagtcgactatatcgcagcaaaccacatcgaatacatcgactataaagatactgaattgttaaaacgattcatttcagaacgtggcaaaattttaccacgtcgtgttacaggtactggcgctaaaaaccaacgtaaattaacgattgctattaaacgcgcacgtatcatgggattattaccattcgttagtgacgaacaataattttatgacaatttccagaaccaaaaagtaaggaaggaggagaacaaggaatgcctacaattaaccaattagtacgtaaacctcgtaaatctaaagtagaaaaatctgattcaccagccttaaacaaaggatataacagttttaagaaaactcaaacaaacgttaactctccgcaaaaacgtggagtttgtacacgtgtgggtacgatgacacctaaaaaaccgaactcagctttacgtaaatatgcccgtgttcgtttgtcaaacttaatcgaagttacagcttatatcccaggtatcggtcacaacttacaagaacacagcgtggtattattacgtggtggacgtgtaaaagacttaccaggggtacgttaccatatcgttcgtggtgcgcttgatactgccggtgttaacgaccgtaaacaaagccgctctaaatacggtacaaaacgtcctaaagcttaattataataagacaataacaacttgaacctaaatcatcggaggtgaaacaaatgccaaatatcgaatctgcaatcaaacgcgtacgtacaagtgctaacgcgaatgcgaaaaattcatctcaaacaaacgcaatgcgtacagcaatcaagaaatttgaagaagctgtagctgctggagctgataacgtcgatgctttatacaacgaagctgttaaagctgttgatatggctgcaactaaaggtttaatccataaaaacaaagctaaccgcgataaaattcgtttaagcaaattagctaaataatgtgagatagaagttagcattcatgaatagtggaaggaggccaaacgcgtatgactgaagaaagaaatcaacgtaaagtttaccaaggtcgcgtggtatcagacaaaatggataaaacaatcacagttgtcgttgaaacaaagaaaaaccaccctatctatggcaaacgtatgaaatattctaaaaaatataaagcgcatgatgaaaacaacacagcgaaagttggagacatcgtaaaaatcatggaaactcgtccattatcagctacaaaacgtttccgtttactagaggtagtcgaagaagcagttattatctaataaaacgagaatttcctaatagattacttaattaacggcactcctcagccaagtcaaaagcctccggtcggaggcttttgactacatgcccatggcgtttacgccccgccctgccactcatcgcagtactgttgtaattcattaagcattctgccgacatggaagccatcacaaacggcatgatgaacctgaatcgccagcggcatcagcaccttgtcgccttgcgtataatatttgcccatagtgaaaacgggggcgaagaagttgtccatattggccacgtttaaatcaaaactggtgaaactcacccagggattggctgagacgaaaaacatattctcaataaaccctttagggaaataggccaggttttcaccgtaacacgccacatcttgcgaatatatgtgtagaaactgccggaaatcgtcgtggtattcactccagagcgatgaaaacgtttcagtttgctcatggaaaacggtgtaacaagggtgaacactatcccatatcaccagctcaccgtctttcattgccatacggaactccggatgagcattcatcaggcgggcaagaatgtgaataaaggccggataaaacttgtgcttatttttctttacggtctttaaaaaggccgtaatatccagctgaacggtctggttataggtacattgagcaactgactgaaatgcctcaaaatgttctttacgatgccattgggatatatcaacggtggtatatccagtgatttttttctccattttagcttccttagctcctgaaaatctcgataactcaaaaaatacgcccggtagtgatcttatttcattatggtgaaagttggaacctcttacgtgccaagccaaataggccgt

SEQ ID NO: 330 - DNA, 6525 bp, Artificial
  Synthetic
tcagatccttccgtatttagccagtatgttctctagtgtggttcgttgtttttgcgtgagccatgagaacgaaccattgagatcatgcttactttgcatgtcactcaaaaattttgcctcaaaactggtgagctgaatttttgcagttaaagcatcgtgtagtgtttttcttagtccgttacgtaggtaggaatctgatgtaatggttgttggtattttgtcaccattcatttttatctggttgttctcaagttcggttacgagatccatttgtctatctagttcaacttggaaaatcaacgtatcagtcgggcggcctcgcttatcaaccaccaatttcatattgctgtaagtgtttaaatctttacttattggtttcaaaacccattggttaagccttttaaactcatggtagttattttcaagcattaacatgaacttaaattcatcaaggctaatctctatatttgccttgtgagttttcttttgtgttagttcttttaataaccactcataaatcctcatagagtatttgttttcaaaagacttaacatgttccagattatattttatgaatttttttaactggaaaagataaggcaatatctcttcactaaaaactaattctaatttttcgcttgagaacttggcatagtttgtccactggaaaatctcaaagcctttaaccaaaggattcctgatttccacagttctcgtcatcagctctctggttgctttagctaatacaccataagcattttccctactgatgttcatcatctgagcgtattggttataagtgaacgataccgtccgttctttccttgtagggttttcaatcgtggggttgagtagtgccacacagcataaaattagcttggtttcatgctccgttaagtcatagcgactaatcgctagttcatttgctttgaaaacaactaattcagacatacatctcaattggtctaggtgattttaatcactataccaattgagatgggctagtcaatgataattactagtccttttcctttgagttgtgggtatctgtaaattctgctagacctttgctggaaaacttgtaaattctgctagaccctctgtaaattccgctagacctttgtgtgttttttttgtttatattcaagtggttataatttatagaataaagaaagaataaaaaaagataaaaagaatagatcccagccctgtgtataactcactactttagtcagttccgcagtattacaaaaggatgtcgcaaacgctgtttgctcctctacaaaacagaccttaaaaccctaaaggcttaagtagcaccctcgcaagctcgggcaaatcgctgaatattccttttgtctccgaccatcaggcacctgagtcgctgtctttttcgtgacattcagttcgctgcgctcacggctctggcagtgaatgggggtaaatggcactacaggcgccttttatggattcatgcaaggaaactacccataatacaagaaaagcccgtcacgggcttctcagggcgttttatggcgggtctgctatgtggtgctatctgactttttgctgttcagcagttcctgccctctgattttccagtctgaccacttcggattatcccgtgacaggtcattcagactggctaatgcacccagtaaggcagcggtatcatcaacaggcttacccgtcttactgtcaagaggacatccggtcaaataaaacgaaaggctcagtcgaaagactgggcctttcgttttgctgaggagacttagggaccctttatgacaacttgacggctacatcattcactttttcttcacaaccggcacggaactcgctcgggctggccccggtgcattttttaaatacccgcgagaaatagagttgatcgtcaaaaccaacattgcgaccgacggtggcgataggcatccgggtggtgctcaaaagcagcttcgcctggctgatacgttggtcctcgcgccagcttaagacgctaatccctaactgctggcggaaaagatgtgacagacgcgacggcgacaagcaaacatgctgtgcgacgctggcgatatcaaaattgctgtctgccaggtgatcgctgatgtactgacaagcctcgcgtacccgattatccatcggtggatggagcgactcgttaatcgcttccatgcgccgcagtaacaattgctcaagcagatttatcgccagcagctccgaatagcgcccttccccttgcccggcgttaatgatttgcccaaacaggtcgctgaaatgcggctggtgcgcttcatccgggcgaaagaaccccgtattggcaaatattgacggccagttaagccattcatgccagtaggcgcgcggacgaaagtaaacccactggtgataccattcgcgagcctccggatgacgaccgtagtgatgaatctctcctggcgggaacagcaaaatatcacccggtcggcaaacaaattctcgtccctgatttttcaccaccccctgaccgcgaatggtgagattgagaatataacctttcattcccagcggtcggtcgataaaaaaatcgagataaccgttggcctcaatcggcgttaaacccgccaccagatgggcattaaacgagtatcccggcagcaggggatcattttgcgcttcagccatacttttcatactcccaccattcagagaagaaaccaattgtccatattgcatcagacattgccgtcactgcgtcttttactggctcttctcgctaacccaaccggtaaccccgcttattaaaagcattctgtaacaaagcgggaccaaagccatgacaaaaacgcgtaacaaaagtgtctataatcacggcagaaaagtccacattgattatttgcacggcgtcacactttgctatgccatagcatttttatccataagattagcggatcctacctgacgctttttatcgcaactctctactgtttctccatacccgttttacctgcaggtgcagtaaaaccaaactggaggaaacacaacatggcagtaatttctatgaaacaattactagaagccggcgtacactttggtcaccaaactcgtcgctggaacccaaaaatgaagaaatatatcttcacagaaagaaacggtatctacatcattgacttacaaaaaacagtgaaattagtagatgcagcttacgattacatgaaaaacgttgcagaagaaggcggcgttgctttattcgtaggaactaaaaaacaagcacaagaagcaatcaaagatgaagcaatccgcgctggtcaatactatgtaaaccatcgttggttaggtggtacgttaactaactgggatacaatccaaaaacgtattgctcgcttgaaaaaaatcaatgcaatggaagaagacggcactttcgaagttttacctaagaaagaagttgctggcttaaacaaagaacgtgaacgtttagaaaaattcttaggtggtatcgctgatatgccaagaattccagatgtaatgtacatcgttgacccgcgtaaagaacgcattgctgttcaagaagcacacaaattaaacattcctatcgttgcaatggttgatacaaactgtgatcctgatgagatcgatgttgtaatcccttcaaatgatgatgcaatccgcgctgtgaaattaatcactgctaaaatggctgacgctttcatcgaaggtaaccaaggggaagaccaagcaactgaagagttattcgttgaagaaacaccagaagcaacttcaatcgaagaaatcgttgatgttgttgaaggaaacaacgaatcagctgaataataatgattacggagctgtctcaaagtcgcataaaggaggtaaatagttcaatggtcatgacagatccaattgcagattttctaactcgcattcgtaatgcgaacatggttaaacatgaaactttagaagtacctgcttcaaaaatcaaacgtgatatcgcagaaatcctgaaacgtgaaggatttatccgcgacgtagaatacatcgaagatgacaaacaaggcgtaatccgtgttttcctaaaatatggtaaaaacgaagaacgtgttatcacaaacttaaaacgtatttctaaaccaggtttacgtgcatacgtaaaagctgacgaagtaccaaaagtattaaacggtctaggaattgcaatcatctctacatcagagggtgtaattactgacaaagaagctagagcgaaaaatatcggcggcgaagtaatcgcctacgtatggtaattctaaaaaatacacaaggaggtgtacgaatttgataggagggaacaagaatggcacaacaaagaagaggcggacgtaaacgtcggaaagtcgactatatcgcagcaaaccacatcgaatacatcgactataaagatactgaattgttaaaacgattcatttcagaacgtggcaaaattttaccacgtcgtgttacaggtactggcgctaaaaaccaacgtaaattaacgattgctattaaacgcgcacgtatcatgggattattaccattcgttagtgacgaacaataattttatgacaatttccagaaccaaaaagtaaggaaggaggagaacaaggaatgcctacaattaaccaattagtacgtaaacctcgtaaatctaaagtagaaaaatctgattcaccagccttaaacaaaggatataacagttttaagaaaactcaaacaaacgttaactctccgcaaaaacgtggagtttgtacacgtgtgggtacgatgacacctaaaaaaccgaactcagctttacgtaaatatgcccgtgttcgtttgtcaaacttaatcgaagttacagcttatatcccaggtatcggtcacaacttacaagaacacagcgtggtattattacgtggtggacgtgtaaaagacttaccaggggtacgttaccatatcgttcgtggtgcgcttgatactgccggtgttaacgaccgtaaacaaagccgctctaaatacggtacaaaacgtcctaaagcttaattataataagacaataacaacttgataagttaatggaggtgtatttaataatggcagttaaaattcgtttaaaacgtatgggttctaaaaagagtcctttttaccgtattgtagtagctgattctcgttctcctcgtgatggacgtttcatcgaaactgtaggtacttacaaccctttgaaagaccctgcagaagtagttttaaaagaagatttagttttagattggttatctaaaggtgcgcaaccttctgatacagttcgtaacatcctttcaaaagaaggcgttatgaaaaaacatcatgaagctaaaaacgttaagaaataaggtgattgaacatggcagatgtgaaaatagtggaaggaggccaaacgcgtatgactgaagaaagaaatcaacgtaaagtttaccaaggtcgcgtggtatcagacaaaatggataaaacaatcacagttgtcgttgaaacaaagaaaaaccaccctatctatggcaaacgtatgaaatattctaaaaaatataaagcgcatgatgaaaacaacacagcgaaagttggagacatcgtaaaaatcatggaaactcgtccattatcagctacaaaacgtttccgtttactagaggtagtcgaagaagcagttattatctaataaaacgagaatttcctaatagattacttaattaacggcactcctcagccaagtcaaaagcctccggtcggaggcttttgactacatgcccatggcgtttacgccccgccctgccactcatcgcagtactgttgtaattcattaagcattctgccgacatggaagccatcacaaacggcatgatgaacctgaatcgccagcggcatcagcaccttgtcgccttgcgtataatatttgcccatagtgaaaacgggggcgaagaagttgtccatattggccacgtttaaatcaaaactggtgaaactcacccagggattggctgagacgaaaaacatattctcaataaaccctttagggaaataggccaggttttcaccgtaacacgccacatcttgcgaatatatgtgtagaaactgccggaaatcgtcgtggtattcactccagagcgatgaaaacgtttcagtttgctcatggaaaacggtgtaacaagggtgaacactatcccatatcaccagctcaccgtctttcattgccatacggaactccggatgagcattcatcaggcgggcaagaatgtgaataaaggccggataaaacttgtgcttatttttctttacggtctttaaaaaggccgtaatatccagctgaacggtctggttataggtacattgagcaactgactgaaatgcctcaaaatgttctttacgatgccattgggatatatcaacggtggtatatccagtgatttttttctccattttagcttccttagctcctgaaaatctcgataactcaaaaaatacgcccggtagtgatcttatttcattatggtgaaagttggaacctcttacgtgccaagccaaataggccgt

SEQ ID NO: 331 - DNA, 6363 bp, Artificial
  Synthetic
tcagatccttccgtatttagccagtatgttctctagtgtggttcgttgtttttgcgtgagccatgagaacgaaccattgagatcatgcttactttgcatgtcactcaaaaattttgcctcaaaactggtgagctgaatttttgcagttaaagcatcgtgtagtgtttttcttagtccgttacgtaggtaggaatctgatgtaatggttgttggtattttgtcaccattcatttttatctggttgttctcaagttcggttacgagatccatttgtctatctagttcaacttggaaaatcaacgtatcagtcgggcggcctcgcttatcaaccaccaatttcatattgctgtaagtgtttaaatctttacttattggtttcaaaacccattggttaagccttttaaactcatggtagttattttcaagcattaacatgaacttaaattcatcaaggctaatctctatatttgccttgtgagttttcttttgtgttagttcttttaataaccactcataaatcctcatagagtatttgttttcaaaagacttaacatgttccagattatattttatgaatttttttaactggaaaagataaggcaatatctcttcactaaaaactaattctaatttttcgcttgagaacttggcatagtttgtccactggaaaatctcaaagcctttaaccaaaggattcctgatttccacagttctcgtcatcagctctctggttgctttagctaatacaccataagcattttccctactgatgttcatcatctgagcgtattggttataagtgaacgataccgtccgttctttccttgtagggttttcaatcgtggggttgagtagtgccacacagcataaaattagcttggtttcatgctccgttaagtcatagcgactaatcgctagttcatttgctttgaaaacaactaattcagacatacatctcaattggtctaggtgattttaatcactataccaattgagatgggctagtcaatgataattactagtccttttcctttgagttgtgggtatctgtaaattctgctagacctttgctggaaaacttgtaaattctgctagaccctctgtaaattccgctagacctttgtgtgttttttttgtttatattcaagtggttataatttatagaataaagaaagaataaaaaaagataaaaagaatagatcccagccctgtgtataactcactactttagtcagttccgcagtattacaaaaggatgtcgcaaacgctgtttgctcctctacaaaacagaccttaaaaccctaaaggcttaagtagcaccctcgcaagctcgggcaaatcgctgaatattccttttgtctccgaccatcaggcacctgagtcgctgtctttttcgtgacattcagttcgctgcgctcacggctctggcagtgaatgggggtaaatggcactacaggcgccttttatggattcatgcaaggaaactacccataatacaagaaaagcccgtcacgggcttctcagggcgttttatggcgggtctgctatgtggtgctatctgactttttgctgttcagcagttcctgccctctgattttccagtctgaccacttcggattatcccgtgacaggtcattcagactggctaatgcacccagtaaggcagcggtatcatcaacaggcttacccgtcttactgtcaagaggacatccggtcaaataaaacgaaaggctcagtcgaaagactgggcctttcgttttgctgaggagacttagggaccctttatgacaacttgacggctacatcattcactttttcttcacaaccggcacggaactcgctcgggctggccccggtgcattttttaaatacccgcgagaaatagagttgatcgtcaaaaccaacattgcgaccgacggtggcgataggcatccgggtggtgctcaaaagcagcttcgcctggctgatacgttggtcctcgcgccagcttaagacgctaatccctaactgctggcggaaaagatgtgacagacgcgacggcgacaagcaaacatgctgtgcgacgctggcgatatcaaaattgctgtctgccaggtgatcgctgatgtactgacaagcctcgcgtacccgattatccatcggtggatggagcgactcgttaatcgcttccatgcgccgcagtaacaattgctcaagcagatttatcgccagcagctccgaatagcgcccttccccttgcccggcgttaatgatttgcccaaacaggtcgctgaaatgcggctggtgcgcttcatccgggcgaaagaaccccgtattggcaaatattgacggccagttaagccattcatgccagtaggcgcgcggacgaaagtaaacccactggtgataccattcgcgagcctccggatgacgaccgtagtgatgaatctctcctggcgggaacagcaaaatatcacccggtcggcaaacaaattctcgtccctgatttttcaccaccccctgaccgcgaatggtgagattgagaatataacctttcattcccagcggtcggtcgataaaaaaatcgagataaccgttggcctcaatcggcgttaaacccgccaccagatgggcattaaacgagtatcccggcagcaggggatcattttgcgcttcagccatacttttcatactcccaccattcagagaagaaaccaattgtccatattgcatcagacattgccgtcactgcgtcttttactggctcttctcgctaacccaaccggtaaccccgcttattaaaagcattctgtaacaaagcgggaccaaagccatgacaaaaacgcgtaacaaaagtgtctataatcacggcagaaaagtccacattgattatttgcacggcgtcacactttgctatgccatagcatttttatccataagattagcggatcctacctgacgctttttatcgcaactctctactgtttctccatacccgttttacctgcaggtgcagtaaaaccaaactggaggaaacacaacatggcagtaatttctatgaaacaattactagaagccggcgtacactttggtcaccaaactcgtcgctggaacccaaaaatgaagaaatatatcttcacagaaagaaacggtatctacatcattgacttacaaaaaacagtgaaattagtagatgcagcttacgattacatgaaaaacgttgcagaagaaggcggcgttgctttattcgtaggaactaaaaaacaagcacaagaagcaatcaaagatgaagcaatccgcgctggtcaatactatgtaaaccatcgttggttaggtggtacgttaactaactgggatacaatccaaaaacgtattgctcgcttgaaaaaaatcaatgcaatggaagaagacggcactttcgaagttttacctaagaaagaagttgctggcttaaacaaagaacgtgaacgtttagaaaaattcttaggtggtatcgctgatatgccaagaattccagatgtaatgtacatcgttgacccgcgtaaagaacgcattgctgttcaagaagcacacaaattaaacattcctatcgttgcaatggttgatacaaactgtgatcctgatgagatcgatgttgtaatcccttcaaatgatgatgcaatccgcgctgtgaaattaatcactgctaaaatggctgacgctttcatcgaaggtaaccaaggggaagaccaagcaactgaagagttattcgttgaagaaacaccagaagcaacttcaatcgaagaaatcgttgatgttgttgaaggaaacaacgaatcagctgaataataatgattacggagctgtctcaaagtcgcataaaggaggtaaatagttcaatggtcatgacagatccaattgcagattttctaactcgcattcgtaatgcgaacatggttaaacatgaaactttagaagtacctgcttcaaaaatcaaacgtgatatcgcagaaatcctgaaacgtgaaggatttatccgcgacgtagaatacatcgaagatgacaaacaaggcgtaatccgtgttttcctaaaatatggtaaaaacgaagaacgtgttatcacaaacttaaaacgtatttctaaaccaggtttacgtgcatacgtaaaagctgacgaagtaccaaaagtattaaacggtctaggaattgcaatcatctctacatcagagggtgtaattactgacaaagaagctagagcgaaaaatatcggcggcgaagtaatcgcctacgtatggtaattctaaaaaatacacaaggaggtgtacgaatttgataggagggaacaagaatggcacaacaaagaagaggcggacgtaaacgtcggaaagtcgactatatcgcagcaaaccacatcgaatacatcgactataaagatactgaattgttaaaacgattcatttcagaacgtggcaaaattttaccacgtcgtgttacaggtactggcgctaaaaaccaacgtaaattaacgattgctattaaacgcgcacgtatcatgggattattaccattcgttagtgacgaacaataattttatgacaatttccagaaccaaaacctaaatcatcggaggtgaaacaaatgccaaatatcgaatctgcaatcaaacgcgtacgtacaagtgctaacgcgaatgcgaaaaattcatctcaaacaaacgcaatgcgtacagcaatcaagaaatttgaagaagctgtagctgctggagctgataacgtcgatgctttatacaacgaagctgttaaagctgttgatatggctgcaactaaaggtttaatccataaaaacaaagctaaccgcgataaaattcgtttaagcaaattagctaaataatgtgagatagaagttagcattcatgtaagttaatggaggtgtatttaataatggcagttaaaattcgtttaaaacgtatgggttctaaaaagagtcctttttaccgtattgtagtagctgattctcgttctcctcgtgatggacgtttcatcgaaactgtaggtacttacaaccctttgaaagaccctgcagaagtagttttaaaagaagatttagttttagattggttatctaaaggtgcgcaaccttctgatacagttcgtaacatcctttcaaaagaaggcgttatgaaaaaacatcatgaagctaaaaacgttaagaaataaggtgattgaacatggcagatgtgaaaatagtggaaggaggccaaacgcgtatgactgaagaaagaaatcaacgtaaagtttaccaaggtcgcgtggtatcagacaaaatggataaaacaatcacagttgtcgttgaaacaaagaaaaaccaccctatctatggcaaacgtatgaaatattctaaaaaatataaagcgcatgatgaaaacaacacagcgaaagttggagacatcgtaaaaatcatggaaactcgtccattatcagctacaaaacgtttccgtttactagaggtagtcgaagaagcagttattatctaataaaacgagaatttcctaatagattacttaattaacggcactcctcagccaagtcaaaagcctccggtcggaggcttttgactacatgcccatggcgtttacgccccgccctgccactcatcgcagtactgttgtaattcattaagcattctgccgacatggaagccatcacaaacggcatgatgaacctgaatcgccagcggcatcagcaccttgtcgccttgcgtataatatttgcccatagtgaaaacgggggcgaagaagttgtccatattggccacgtttaaatcaaaactggtgaaactcacccagggattggctgagacgaaaaacatattctcaataaaccctttagggaaataggccaggttttcaccgtaacacgccacatcttgcgaatatatgtgtagaaactgccggaaatcgtcgtggtattcactccagagcgatgaaaacgtttcagtttgctcatggaaaacggtgtaacaagggtgaacactatcccatatcaccagctcaccgtctttcattgccatacggaactccggatgagcattcatcaggcgggcaagaatgtgaataaaggccggataaaacttgtgcttatttttctttacggtctttaaaaaggccgtaatatccagctgaacggtctggttataggtacattgagcaactgactgaaatgcctcaaaatgttctttacgatgccattgggatatatcaacggtggtatatccagtgatttttttctccattttagcttccttagctcctgaaaatctcgataactcaaaaaatacgcccggtagtgatcttatttcattatggtgaaagttggaacctcttacgtgccaagccaaataggccgt

SEQ ID NO: 332 - DNA, 6537 bp, Artificial
  Synthetic
tcagatccttccgtatttagccagtatgttctctagtgtggttcgttgtttttgcgtgagccatgagaacgaaccattgagatcatgcttactttgcatgtcactcaaaaattttgcctcaaaactggtgagctgaatttttgcagttaaagcatcgtgtagtgtttttcttagtccgttacgtaggtaggaatctgatgtaatggttgttggtattttgtcaccattcatttttatctggttgttctcaagttcggttacgagatccatttgtctatctagttcaacttggaaaatcaacgtatcagtcgggcggcctcgcttatcaaccaccaatttcatattgctgtaagtgtttaaatctttacttattggtttcaaaacccattggttaagccttttaaactcatggtagttattttcaagcattaacatgaacttaaattcatcaaggctaatctctatatttgccttgtgagttttcttttgtgttagttcttttaataaccactcataaatcctcatagagtatttgttttcaaaagacttaacatgttccagattatattttatgaatttttttaactggaaaagataaggcaatatctcttcactaaaaactaattctaatttttcgcttgagaacttggcatagtttgtccactggaaaatctcaaagcctttaaccaaaggattcctgatttccacagttctcgtcatcagctctctggttgctttagctaatacaccataagcattttccctactgatgttcatcatctgagcgtattggttataagtgaacgataccgtccgttctttccttgtagggttttcaatcgtggggttgagtagtgccacacagcataaaattagcttggtttcatgctccgttaagtcatagcgactaatcgctagttcatttgctttgaaaacaactaattcagacatacatctcaattggtctaggtgattttaatcactataccaattgagatgggctagtcaatgataattactagtccttttcctttgagttgtgggtatctgtaaattctgctagacctttgctggaaaacttgtaaattctgctagaccctctgtaaattccgctagacctttgtgtgttttttttgtttatattcaagtggttataatttatagaataaagaaagaataaaaaaagataaaaagaatagatcccagccctgtgtataactcactactttagtcagttccgcagtattacaaaaggatgtcgcaaacgctgtttgctcctctacaaaacagaccttaaaaccctaaaggcttaagtagcaccctcgcaagctcgggcaaatcgctgaatattccttttgtctccgaccatcaggcacctgagtcgctgtctttttcgtgacattcagttcgctgcgctcacggctctggcagtgaatgggggtaaatggcactacaggcgccttttatggattcatgcaaggaaactacccataatacaagaaaagcccgtcacgggcttctcagggcgttttatggcgggtctgctatgtggtgctatctgactttttgctgttcagcagttcctgccctctgattttccagtctgaccacttcggattatcccgtgacaggtcattcagactggctaatgcacccagtaaggcagcggtatcatcaacaggcttacccgtcttactgtcaagaggacatccggtcaaataaaacgaaaggctcagtcgaaagactgggcctttcgttttgctgaggagacttagggaccctttatgacaacttgacggctacatcattcactttttcttcacaaccggcacggaactcgctcgggctggccccggtgcattttttaaatacccgcgagaaatagagttgatcgtcaaaaccaacattgcgaccgacggtggcgataggcatccgggtggtgctcaaaagcagcttcgcctggctgatacgttggtcctcgcgccagcttaagacgctaatccctaactgctggcggaaaagatgtgacagacgcgacggcgacaagcaaacatgctgtgcgacgctggcgatatcaaaattgctgtctgccaggtgatcgctgatgtactgacaagcctcgcgtacccgattatccatcggtggatggagcgactcgttaatcgcttccatgcgccgcagtaacaattgctcaagcagatttatcgccagcagctccgaatagcgcccttccccttgcccggcgttaatgatttgcccaaacaggtcgctgaaatgcggctggtgcgcttcatccgggcgaaagaaccccgtattggcaaatattgacggccagttaagccattcatgccagtaggcgcgcggacgaaagtaaacccactggtgataccattcgcgagcctccggatgacgaccgtagtgatgaatctctcctggcgggaacagcaaaatatcacccggtcggcaaacaaattctcgtccctgatttttcaccaccccctgaccgcgaatggtgagattgagaatataacctttcattcccagcggtcggtcgataaaaaaatcgagataaccgttggcctcaatcggcgttaaacccgccaccagatgggcattaaacgagtatcccggcagcaggggatcattttgcgcttcagccatacttttcatactcccaccattcagagaagaaaccaattgtccatattgcatcagacattgccgtcactgcgtcttttactggctcttctcgctaacccaaccggtaaccccgcttattaaaagcattctgtaacaaagcgggaccaaagccatgacaaaaacgcgtaacaaaagtgtctataatcacggcagaaaagtccacattgattatttgcacggcgtcacactttgctatgccatagcatttttatccataagattagcggatcctacctgacgctttttatcgcaactctctactgtttctccatacccgttttacctgcaggtgcagtaaaaccaaactggaggaaacacaacatggcagtaatttctatgaaacaattactagaagccggcgtacactttggtcaccaaactcgtcgctggaacccaaaaatgaagaaatatatcttcacagaaagaaacggtatctacatcattgacttacaaaaaacagtgaaattagtagatgcagcttacgattacatgaaaaacgttgcagaagaaggcggcgttgctttattcgtaggaactaaaaaacaagcacaagaagcaatcaaagatgaagcaatccgcgctggtcaatactatgtaaaccatcgttggttaggtggtacgttaactaactgggatacaatccaaaaacgtattgctcgcttgaaaaaaatcaatgcaatggaagaagacggcactttcgaagttttacctaagaaagaagttgctggcttaaacaaagaacgtgaacgtttagaaaaattcttaggtggtatcgctgatatgccaagaattccagatgtaatgtacatcgttgacccgcgtaaagaacgcattgctgttcaagaagcacacaaattaaacattcctatcgttgcaatggttgatacaaactgtgatcctgatgagatcgatgttgtaatcccttcaaatgatgatgcaatccgcgctgtgaaattaatcactgctaaaatggctgacgctttcatcgaaggtaaccaaggggaagaccaagcaactgaagagttattcgttgaagaaacaccagaagcaacttcaatcgaagaaatcgttgatgttgttgaaggaaacaacgaatcagctgaataataatgattacggagctgtctcaaagtcgcataaaggaggtaaatagttcaatggtcatgacagatccaattgcagattttctaactcgcattcgtaatgcgaacatggttaaacatgaaactttagaagtacctgcttcaaaaatcaaacgtgatatcgcagaaatcctgaaacgtgaaggatttatccgcgacgtagaatacatcgaagatgacaaacaaggcgtaatccgtgttttcctaaaatatggtaaaaacgaagaacgtgttatcacaaacttaaaacgtatttctaaaccaggtttacgtgcatacgtaaaagctgacgaagtaccaaaagtattaaacggtctaggaattgcaatcatctctacatcagagggtgtaattactgacaaagaagctagagcgaaaaatatcggcggcgaagtaatcgcctacgtatggtaattctaaaaaatacacaaggaggtgtaagtaaggaaggaggagaacaaggaatgcctacaattaaccaattagtacgtaaacctcgtaaatctaaagtagaaaaatctgattcaccagccttaaacaaaggatataacagttttaagaaaactcaaacaaacgttaactctccgcaaaaacgtggagtttgtacacgtgtgggtacgatgacacctaaaaaaccgaactcagctttacgtaaatatgcccgtgttcgtttgtcaaacttaatcgaagttacagcttatatcccaggtatcggtcacaacttacaagaacacagcgtggtattattacgtggtggacgtgtaaaagacttaccaggggtacgttaccatatcgttcgtggtgcgcttgatactgccggtgttaacgaccgtaaacaaagccgctctaaatacggtacaaaacgtcctaaagcttaattataataagacaataacaacttgaacctaaatcatcggaggtgaaacaaatgccaaatatcgaatctgcaatcaaacgcgtacgtacaagtgctaacgcgaatgcgaaaaattcatctcaaacaaacgcaatgcgtacagcaatcaagaaatttgaagaagctgtagctgctggagctgataacgtcgatgctttatacaacgaagctgttaaagctgttgatatggctgcaactaaaggtttaatccataaaaacaaagctaaccgcgataaaattcgtttaagcaaattagctaaataatgtgagatagaagttagcattcatgtaagttaatggaggtgtatttaataatggcagttaaaattcgtttaaaacgtatgggttctaaaaagagtcctttttaccgtattgtagtagctgattctcgttctcctcgtgatggacgtttcatcgaaactgtaggtacttacaaccctttgaaagaccctgcagaagtagttttaaaagaagatttagttttagattggttatctaaaggtgcgcaaccttctgatacagttcgtaacatcctttcaaaagaaggcgttatgaaaaaacatcatgaagctaaaaacgttaagaaataaggtgattgaacatggcagatgtgaaaatagtggaaggaggccaaacgcgtatgactgaagaaagaaatcaacgtaaagtttaccaaggtcgcgtggtatcagacaaaatggataaaacaatcacagttgtcgttgaaacaaagaaaaaccaccctatctatggcaaacgtatgaaatattctaaaaaatataaagcgcatgatgaaaacaacacagcgaaagttggagacatcgtaaaaatcatggaaactcgtccattatcagctacaaaacgtttccgtttactagaggtagtcgaagaagcagttattatctaataaaacgagaatttcctaatagattacttaattaacggcactcctcagccaagtcaaaagcctccggtcggaggcttttgactacatgcccatggcgtttacgccccgccctgccactcatcgcagtactgttgtaattcattaagcattctgccgacatggaagccatcacaaacggcatgatgaacctgaatcgccagcggcatcagcaccttgtcgccttgcgtataatatttgcccatagtgaaaacgggggcgaagaagttgtccatattggccacgtttaaatcaaaactggtgaaactcacccagggattggctgagacgaaaaacatattctcaataaaccctttagggaaataggccaggttttcaccgtaacacgccacatcttgcgaatatatgtgtagaaactgccggaaatcgtcgtggtattcactccagagcgatgaaaacgtttcagtttgctcatggaaaacggtgtaacaagggtgaacactatcccatatcaccagctcaccgtctttcattgccatacggaactccggatgagcattcatcaggcgggcaagaatgtgaataaaggccggataaaacttgtgcttatttttctttacggtctttaaaaaggccgtaatatccagctgaacggtctggttataggtacattgagcaactgactgaaatgcctcaaaatgttctttacgatgccattgggatatatcaacggtggtatatccagtgatttttttctccattttagcttccttagctcctgaaaatctcgataactcaaaaaatacgcccggtagtgatcttatttcattatggtgaaagttggaacctcttacgtgccaagccaaataggccgt

SEQ ID NO: 333 - DNA, 6378 bp, Artificial
  Synthetic
tcagatccttccgtatttagccagtatgttctctagtgtggttcgttgtttttgcgtgagccatgagaacgaaccattgagatcatgcttactttgcatgtcactcaaaaattttgcctcaaaactggtgagctgaatttttgcagttaaagcatcgtgtagtgtttttcttagtccgttacgtaggtaggaatctgatgtaatggttgttggtattttgtcaccattcatttttatctggttgttctcaagttcggttacgagatccatttgtctatctagttcaacttggaaaatcaacgtatcagtcgggcggcctcgcttatcaaccaccaatttcatattgctgtaagtgtttaaatctttacttattggtttcaaaacccattggttaagccttttaaactcatggtagttattttcaagcattaacatgaacttaaattcatcaaggctaatctctatatttgccttgtgagttttcttttgtgttagttcttttaataaccactcataaatcctcatagagtatttgttttcaaaagacttaacatgttccagattatattttatgaatttttttaactggaaaagataaggcaatatctcttcactaaaaactaattctaatttttcgcttgagaacttggcatagtttgtccactggaaaatctcaaagcctttaaccaaaggattcctgatttccacagttctcgtcatcagctctctggttgctttagctaatacaccataagcattttccctactgatgttcatcatctgagcgtattggttataagtgaacgataccgtccgttctttccttgtagggttttcaatcgtggggttgagtagtgccacacagcataaaattagcttggtttcatgctccgttaagtcatagcgactaatcgctagttcatttgctttgaaaacaactaattcagacatacatctcaattggtctaggtgattttaatcactataccaattgagatgggctagtcaatgataattactagtccttttcctttgagttgtgggtatctgtaaattctgctagacctttgctggaaaacttgtaaattctgctagaccctctgtaaattccgctagacctttgtgtgttttttttgtttatattcaagtggttataatttatagaataaagaaagaataaaaaaagataaaaagaatagatcccagccctgtgtataactcactactttagtcagttccgcagtattacaaaaggatgtcgcaaacgctgtttgctcctctacaaaacagaccttaaaaccctaaaggcttaagtagcaccctcgcaagctcgggcaaatcgctgaatattccttttgtctccgaccatcaggcacctgagtcgctgtctttttcgtgacattcagttcgctgcgctcacggctctggcagtgaatgggggtaaatggcactacaggcgccttttatggattcatgcaaggaaactacccataatacaagaaaagcccgtcacgggcttctcagggcgttttatggcgggtctgctatgtggtgctatctgactttttgctgttcagcagttcctgccctctgattttccagtctgaccacttcggattatcccgtgacaggtcattcagactggctaatgcacccagtaaggcagcggtatcatcaacaggcttacccgtcttactgtcaagaggacatccggtcaaataaaacgaaaggctcagtcgaaagactgggcctttcgttttgctgaggagacttagggaccctttatgacaacttgacggctacatcattcactttttcttcacaaccggcacggaactcgctcgggctggccccggtgcattttttaaatacccgcgagaaatagagttgatcgtcaaaaccaacattgcgaccgacggtggcgataggcatccgggtggtgctcaaaagcagcttcgcctggctgatacgttggtcctcgcgccagcttaagacgctaatccctaactgctggcggaaaagatgtgacagacgcgacggcgacaagcaaacatgctgtgcgacgctggcgatatcaaaattgctgtctgccaggtgatcgctgatgtactgacaagcctcgcgtacccgattatccatcggtggatggagcgactcgttaatcgcttccatgcgccgcagtaacaattgctcaagcagatttatcgccagcagctccgaatagcgcccttccccttgcccggcgttaatgatttgcccaaacaggtcgctgaaatgcggctggtgcgcttcatccgggcgaaagaaccccgtattggcaaatattgacggccagttaagccattcatgccagtaggcgcgcggacgaaagtaaacccactggtgataccattcgcgagcctccggatgacgaccgtagtgatgaatctctcctggcgggaacagcaaaatatcacccggtcggcaaacaaattctcgtccctgatttttcaccaccccctgaccgcgaatggtgagattgagaatataacctttcattcccagcggtcggtcgataaaaaaatcgagataaccgttggcctcaatcggcgttaaacccgccaccagatgggcattaaacgagtatcccggcagcaggggatcattttgcgcttcagccatacttttcatactcccaccattcagagaagaaaccaattgtccatattgcatcagacattgccgtcactgcgtcttttactggctcttctcgctaacccaaccggtaaccccgcttattaaaagcattctgtaacaaagcgggaccaaagccatgacaaaaacgcgtaacaaaagtgtctataatcacggcagaaaagtccacattgattatttgcacggcgtcacactttgctatgccatagcatttttatccataagattagcggatcctacctgacgctttttatcgcaactctctactgtttctccatacccgttttacctgcaggtgcagtaaaaccaaactggaggaaacacaacatggcagtaatttctatgaaacaattactagaagccggcgtacactttggtcaccaaactcgtcgctggaacccaaaaatgaagaaatatatcttcacagaaagaaacggtatctacatcattgacttacaaaaaacagtgaaattagtagatgcagcttacgattacatgaaaaacgttgcagaagaaggcggcgttgctttattcgtaggaactaaaaaacaagcacaagaagcaatcaaagatgaagcaatccgcgctggtcaatactatgtaaaccatcgttggttaggtggtacgttaactaactgggatacaatccaaaaacgtattgctcgcttgaaaaaaatcaatgcaatggaagaagacggcactttcgaagttttacctaagaaagaagttgctggcttaaacaaagaacgtgaacgtttagaaaaattcttaggtggtatcgctgatatgccaagaattccagatgtaatgtacatcgttgacccgcgtaaagaacgcattgctgttcaagaagcacacaaattaaacattcctatcgttgcaatggttgatacaaactgtgatcctgatgagatcgatgttgtaatcccttcaaatgatgatgcaatccgcgctgtgaaattaatcactgctaaaatggctgacgctttcatcgaaggtaaccaaggggaagaccaagcaactgaagagttattcgttgaagaaacaccagaagcaacttcaatcgaagaaatcgttgatgttgttgaaggaaacaacgaatcagctgaataataatgattacggagctgtctcaaagacgaatttgataggagggaacaagaatggcacaacaaagaagaggcggacgtaaacgtcggaaagtcgactatatcgcagcaaaccacatcgaatacatcgactataaagatactgaattgttaaaacgattcatttcagaacgtggcaaaattttaccacgtcgtgttacaggtactggcgctaaaaaccaacgtaaattaacgattgctattaaacgcgcacgtatcatgggattattaccattcgttagtgacgaacaataattttatgacaatttccagaaccaaaaagtaaggaaggaggagaacaaggaatgcctacaattaaccaattagtacgtaaacctcgtaaatctaaagtagaaaaatctgattcaccagccttaaacaaaggatataacagttttaagaaaactcaaacaaacgttaactctccgcaaaaacgtggagtttgtacacgtgtgggtacgatgacacctaaaaaaccgaactcagctttacgtaaatatgcccgtgttcgtttgtcaaacttaatcgaagttacagcttatatcccaggtatcggtcacaacttacaagaacacagcgtggtattattacgtggtggacgtgtaaaagacttaccaggggtacgttaccatatcgttcgtggtgcgcttgatactgccggtgttaacgaccgtaaacaaagccgctctaaatacggtacaaaacgtcctaaagcttaattataataagacaataacaacttgaacctaaatcatcggaggtgaaacaaatgccaaatatcgaatctgcaatcaaacgcgtacgtacaagtgctaacgcgaatgcgaaaaattcatctcaaacaaacgcaatgcgtacagcaatcaagaaatttgaagaagctgtagctgctggagctgataacgtcgatgctttatacaacgaagctgttaaagctgttgatatggctgcaactaaaggtttaatccataaaaacaaagctaaccgcgataaaattcgtttaagcaaattagctaaataatgtgagatagaagttagcattcatgtaagttaatggaggtgtatttaataatggcagttaaaattcgtttaaaacgtatgggttctaaaaagagtcctttttaccgtattgtagtagctgattctcgttctcctcgtgatggacgtttcatcgaaactgtaggtacttacaaccctttgaaagaccctgcagaagtagttttaaaagaagatttagttttagattggttatctaaaggtgcgcaaccttctgatacagttcgtaacatcctttcaaaagaaggcgttatgaaaaaacatcatgaagctaaaaacgttaagaaataaggtgattgaacatggcagatgtgaaaatagtggaaggaggccaaacgcgtatgactgaagaaagaaatcaacgtaaagtttaccaaggtcgcgtggtatcagacaaaatggataaaacaatcacagttgtcgttgaaacaaagaaaaaccaccctatctatggcaaacgtatgaaatattctaaaaaatataaagcgcatgatgaaaacaacacagcgaaagttggagacatcgtaaaaatcatggaaactcgtccattatcagctacaaaacgtttccgtttactagaggtagtcgaagaagcagttattatctaataaaacgagaatttcctaatagattacttaattaacggcactcctcagccaagtcaaaagcctccggtcggaggcttttgactacatgcccatggcgtttacgccccgccctgccactcatcgcagtactgttgtaattcattaagcattctgccgacatggaagccatcacaaacggcatgatgaacctgaatcgccagcggcatcagcaccttgtcgccttgcgtataatatttgcccatagtgaaaacgggggcgaagaagttgtccatattggccacgtttaaatcaaaactggtgaaactcacccagggattggctgagacgaaaaacatattctcaataaaccctttagggaaataggccaggttttcaccgtaacacgccacatcttgcgaatatatgtgtagaaactgccggaaatcgtcgtggtattcactccagagcgatgaaaacgtttcagtttgctcatggaaaacggtgtaacaagggtgaacactatcccatatcaccagctcaccgtctttcattgccatacggaactccggatgagcattcatcaggcgggcaagaatgtgaataaaggccggataaaacttgtgcttatttttctttacggtctttaaaaaggccgtaatatccagctgaacggtctggttataggtacattgagcaactgactgaaatgcctcaaaatgttctttacgatgccattgggatatatcaacggtggtatatccagtgatttttttctccattttagcttccttagctcctgaaaatctcgataactcaaaaaatacgcccggtagtgatcttatttcattatggtgaaagttggaacctcttacgtgccaagccaaataggccgt

SEQ ID NO: 334 - DNA, 5991 bp, Artificial
  Synthetic
tcagatccttccgtatttagccagtatgttctctagtgtggttcgttgtttttgcgtgagccatgagaacgaaccattgagatcatgcttactttgcatgtcactcaaaaattttgcctcaaaactggtgagctgaatttttgcagttaaagcatcgtgtagtgtttttcttagtccgttacgtaggtaggaatctgatgtaatggttgttggtattttgtcaccattcatttttatctggttgttctcaagttcggttacgagatccatttgtctatctagttcaacttggaaaatcaacgtatcagtcgggcggcctcgcttatcaaccaccaatttcatattgctgtaagtgtttaaatctttacttattggtttcaaaacccattggttaagccttttaaactcatggtagttattttcaagcattaacatgaacttaaattcatcaaggctaatctctatatttgccttgtgagttttcttttgtgttagttcttttaataaccactcataaatcctcatagagtatttgttttcaaaagacttaacatgttccagattatattttatgaatttttttaactggaaaagataaggcaatatctcttcactaaaaactaattctaatttttcgcttgagaacttggcatagtttgtccactggaaaatctcaaagcctttaaccaaaggattcctgatttccacagttctcgtcatcagctctctggttgctttagctaatacaccataagcattttccctactgatgttcatcatctgagcgtattggttataagtgaacgataccgtccgttctttccttgtagggttttcaatcgtggggttgagtagtgccacacagcataaaattagcttggtttcatgctccgttaagtcatagcgactaatcgctagttcatttgctttgaaaacaactaattcagacatacatctcaattggtctaggtgattttaatcactataccaattgagatgggctagtcaatgataattactagtccttttcctttgagttgtgggtatctgtaaattctgctagacctttgctggaaaacttgtaaattctgctagaccctctgtaaattccgctagacctttgtgtgttttttttgtttatattcaagtggttataatttatagaataaagaaagaataaaaaaagataaaaagaatagatcccagccctgtgtataactcactactttagtcagttccgcagtattacaaaaggatgtcgcaaacgctgtttgctcctctacaaaacagaccttaaaaccctaaaggcttaagtagcaccctcgcaagctcgggcaaatcgctgaatattccttttgtctccgaccatcaggcacctgagtcgctgtctttttcgtgacattcagttcgctgcgctcacggctctggcagtgaatgggggtaaatggcactacaggcgccttttatggattcatgcaaggaaactacccataatacaagaaaagcccgtcacgggcttctcagggcgttttatggcgggtctgctatgtggtgctatctgactttttgctgttcagcagttcctgccctctgattttccagtctgaccacttcggattatcccgtgacaggtcattcagactggctaatgcacccagtaaggcagcggtatcatcaacaggcttacccgtcttactgtcaagaggacatccggtcaaataaaacgaaaggctcagtcgaaagactgggcctttcgttttgctgaggagacttagggaccctttatgacaacttgacggctacatcattcactttttcttcacaaccggcacggaactcgctcgggctggccccggtgcattttttaaatacccgcgagaaatagagttgatcgtcaaaaccaacattgcgaccgacggtggcgataggcatccgggtggtgctcaaaagcagcttcgcctggctgatacgttggtcctcgcgccagcttaagacgctaatccctaactgctggcggaaaagatgtgacagacgcgacggcgacaagcaaacatgctgtgcgacgctggcgatatcaaaattgctgtctgccaggtgatcgctgatgtactgacaagcctcgcgtacccgattatccatcggtggatggagcgactcgttaatcgcttccatgcgccgcagtaacaattgctcaagcagatttatcgccagcagctccgaatagcgcccttccccttgcccggcgttaatgatttgcccaaacaggtcgctgaaatgcggctggtgcgcttcatccgggcgaaagaaccccgtattggcaaatattgacggccagttaagccattcatgccagtaggcgcgcggacgaaagtaaacccactggtgataccattcgcgagcctccggatgacgaccgtagtgatgaatctctcctggcgggaacagcaaaatatcacccggtcggcaaacaaattctcgtccctgatttttcaccaccccctgaccgcgaatggtgagattgagaatataacctttcattcccagcggtcggtcgataaaaaaatcgagataaccgttggcctcaatcggcgttaaacccgccaccagatgggcattaaacgagtatcccggcagcaggggatcattttgcgcttcagccatacttttcatactcccaccattcagagaagaaaccaattgtccatattgcatcagacattgccgtcactgcgtcttttactggctcttctcgctaacccaaccggtaaccccgcttattaaaagcattctgtaacaaagcgggaccaaagccatgacaaaaacgcgtaacaaaagtgtctataatcacggcagaaaagtccacattgattatttgcacggcgtcacactttgctatgccatagcatttttatccataagattagcggatcctacctgacgctttttatcgcaactctctactgtttctccatacccgttttacctgcaggtgcagttcgcataaaggaggtaaatagttcaatggtcatgacagatccaattgcagattttctaactcgcattcgtaatgcgaacatggttaaacatgaaactttagaagtacctgcttcaaaaatcaaacgtgatatcgcagaaatcctgaaacgtgaaggatttatccgcgacgtagaatacatcgaagatgacaaacaaggcgtaatccgtgttttcctaaaatatggtaaaaacgaagaacgtgttatcacaaacttaaaacgtatttctaaaccaggtttacgtgcatacgtaaaagctgacgaagtaccaaaagtattaaacggtctaggaattgcaatcatctctacatcagagggtgtaattactgacaaagaagctagagcgaaaaatatcggcggcgaagtaatcgcctacgtatggtaattctaaaaaatacacaaggaggtgtacgaatttgataggagggaacaagaatggcacaacaaagaagaggcggacgtaaacgtcggaaagtcgactatatcgcagcaaaccacatcgaatacatcgactataaagatactgaattgttaaaacgattcatttcagaacgtggcaaaattttaccacgtcgtgttacaggtactggcgctaaaaaccaacgtaaattaacgattgctattaaacgcgcacgtatcatgggattattaccattcgttagtgacgaacaataattttatgacaatttccagaaccaaaaagtaaggaaggaggagaacaaggaatgcctacaattaaccaattagtacgtaaacctcgtaaatctaaagtagaaaaatctgattcaccagccttaaacaaaggatataacagttttaagaaaactcaaacaaacgttaactctccgcaaaaacgtggagtttgtacacgtgtgggtacgatgacacctaaaaaaccgaactcagctttacgtaaatatgcccgtgttcgtttgtcaaacttaatcgaagttacagcttatatcccaggtatcggtcacaacttacaagaacacagcgtggtattattacgtggtggacgtgtaaaagacttaccaggggtacgttaccatatcgttcgtggtgcgcttgatactgccggtgttaacgaccgtaaacaaagccgctctaaatacggtacaaaacgtcctaaagcttaattataataagacaataacaacttgaacctaaatcatcggaggtgaaacaaatgccaaatatcgaatctgcaatcaaacgcgtacgtacaagtgctaacgcgaatgcgaaaaattcatctcaaacaaacgcaatgcgtacagcaatcaagaaatttgaagaagctgtagctgctggagctgataacgtcgatgctttatacaacgaagctgttaaagctgttgatatggctgcaactaaaggtttaatccataaaaacaaagctaaccgcgataaaattcgtttaagcaaattagctaaataatgtgagatagaagttagcattcatgtaagttaatggaggtgtatttaataatggcagttaaaattcgtttaaaacgtatgggttctaaaaagagtcctttttaccgtattgtagtagctgattctcgttctcctcgtgatggacgtttcatcgaaactgtaggtacttacaaccctttgaaagaccctgcagaagtagttttaaaagaagatttagttttagattggttatctaaaggtgcgcaaccttctgatacagttcgtaacatcctttcaaaagaaggcgttatgaaaaaacatcatgaagctaaaaacgttaagaaataaggtgattgaacatggcagatgtgaaaatagtggaaggaggccaaacgcgtatgactgaagaaagaaatcaacgtaaagtttaccaaggtcgcgtggtatcagacaaaatggataaaacaatcacagttgtcgttgaaacaaagaaaaaccaccctatctatggcaaacgtatgaaatattctaaaaaatataaagcgcatgatgaaaacaacacagcgaaagttggagacatcgtaaaaatcatggaaactcgtccattatcagctacaaaacgtttccgtttactagaggtagtcgaagaagcagttattatctaataaaacgagaatttcctaatagattacttaattaacggcactcctcagccaagtcaaaagcctccggtcggaggcttttgactacatgcccatggcgtttacgccccgccctgccactcatcgcagtactgttgtaattcattaagcattctgccgacatggaagccatcacaaacggcatgatgaacctgaatcgccagcggcatcagcaccttgtcgccttgcgtataatatttgcccatagtgaaaacgggggcgaagaagttgtccatattggccacgtttaaatcaaaactggtgaaactcacccagggattggctgagacgaaaaacatattctcaataaaccctttagggaaataggccaggttttcaccgtaacacgccacatcttgcgaatatatgtgtagaaactgccggaaatcgtcgtggtattcactccagagcgatgaaaacgtttcagtttgctcatggaaaacggtgtaacaagggtgaacactatcccatatcaccagctcaccgtctttcattgccatacggaactccggatgagcattcatcaggcgggcaagaatgtgaataaaggccggataaaacttgtgcttatttttctttacggtctttaaaaaggccgtaatatccagctgaacggtctggttataggtacattgagcaactgactgaaatgcctcaaaatgttctttacgatgccattgggatatatcaacggtggtatatccagtgatttttttctccattttagcttccttagctcctgaaaatctcgataactcaaaaaatacgcccggtagtgatcttatttcattatggtgaaagttggaacctcttacgtgccaagccaaataggccgt

SEQ ID NO: 335 - DNA, 8433 bp, Artificial
  Synthetic
tcagatccttccgtatttagccagtatgttctctagtgtggttcgttgtttttgcgtgagccatgagaacgaaccattgagatcatgcttactttgcatgtcactcaaaaattttgcctcaaaactggtgagctgaatttttgcagttaaagcatcgtgtagtgtttttcttagtccgttacgtaggtaggaatctgatgtaatggttgttggtattttgtcaccattcatttttatctggttgttctcaagttcggttacgagatccatttgtctatctagttcaacttggaaaatcaacgtatcagtcgggcggcctcgcttatcaaccaccaatttcatattgctgtaagtgtttaaatctttacttattggtttcaaaacccattggttaagccttttaaactcatggtagttattttcaagcattaacatgaacttaaattcatcaaggctaatctctatatttgccttgtgagttttcttttgtgttagttcttttaataaccactcataaatcctcatagagtatttgttttcaaaagacttaacatgttccagattatattttatgaatttttttaactggaaaagataaggcaatatctcttcactaaaaactaattctaatttttcgcttgagaacttggcatagtttgtccactggaaaatctcaaagcctttaaccaaaggattcctgatttccacagttctcgtcatcagctctctggttgctttagctaatacaccataagcattttccctactgatgttcatcatctgagcgtattggttataagtgaacgataccgtccgttctttccttgtagggttttcaatcgtggggttgagtagtgccacacagcataaaattagcttggtttcatgctccgttaagtcatagcgactaatcgctagttcatttgctttgaaaacaactaattcagacatacatctcaattggtctaggtgattttaatcactataccaattgagatgggctagtcaatgataattactagtccttttcctttgagttgtgggtatctgtaaattctgctagacctttgctggaaaacttgtaaattctgctagaccctctgtaaattccgctagacctttgtgtgttttttttgtttatattcaagtggttataatttatagaataaagaaagaataaaaaaagataaaaagaatagatcccagccctgtgtataactcactactttagtcagttccgcagtattacaaaaggatgtcgcaaacgctgtttgctcctctacaaaacagaccttaaaaccctaaaggcttaagtagcaccctcgcaagctcgggcaaatcgctgaatattccttttgtctccgaccatcaggcacctgagtcgctgtctttttcgtgacattcagttcgctgcgctcacggctctggcagtgaatgggggtaaatggcactacaggcgccttttatggattcatgcaaggaaactacccataatacaagaaaagcccgtcacgggcttctcagggcgttttatggcgggtctgctatgtggtgctatctgactttttgctgttcagcagttcctgccctctgattttccagtctgaccacttcggattatcccgtgacaggtcattcagactggctaatgcacccagtaaggcagcggtatcatcaacaggcttacccgtcttactgtcaagaggacatccggtcaaataaaacgaaaggctcagtcgaaagactgggcctttcgttttgctgaggagacttagggaccctttatgacaacttgacggctacatcattcactttttcttcacaaccggcacggaactcgctcgggctggccccggtgcattttttaaatacccgcgagaaatagagttgatcgtcaaaaccaacattgcgaccgacggtggcgataggcatccgggtggtgctcaaaagcagcttcgcctggctgatacgttggtcctcgcgccagcttaagacgctaatccctaactgctggcggaaaagatgtgacagacgcgacggcgacaagcaaacatgctgtgcgacgctggcgatatcaaaattgctgtctgccaggtgatcgctgatgtactgacaagcctcgcgtacccgattatccatcggtggatggagcgactcgttaatcgcttccatgcgccgcagtaacaattgctcaagcagatttatcgccagcagctccgaatagcgcccttccccttgcccggcgttaatgatttgcccaaacaggtcgctgaaatgcggctggtgcgcttcatccgggcgaaagaaccccgtattggcaaatattgacggccagttaagccattcatgccagtaggcgcgcggacgaaagtaaacccactggtgataccattcgcgagcctccggatgacgaccgtagtgatgaatctctcctggcgggaacagcaaaatatcacccggtcggcaaacaaattctcgtccctgatttttcaccaccccctgaccgcgaatggtgagattgagaatataacctttcattcccagcggtcggtcgataaaaaaatcgagataaccgttggcctcaatcggcgttaaacccgccaccagatgggcattaaacgagtatcccggcagcaggggatcattttgcgcttcagccatacttttcatactcccaccattcagagaagaaaccaattgtccatattgcatcagacattgccgtcactgcgtcttttactggctcttctcgctaacccaaccggtaaccccgcttattaaaagcattctgtaacaaagcgggaccaaagccatgacaaaaacgcgtaacaaaagtgtctataatcacggcagaaaagtccacattgattatttgcacggcgtcacactttgctatgccatagcatttttatccataagattagcggatcctacctgacgctttttatcgcaactctctactgtttctccatacccgttttacctgcaggtgcagtcatttatttattggaggaatttttaatgtctcgttatactggaccatcatggaaagtatctcgtcgtctaggtatctctttatcaggtactggtaaagaactagctcgtcgcccttacaaaccaggacaacacggacctaacagccgtggtaaagtttctgaatacggaatgcaattaactgaaaaacaaaaattacgtcatatgtatggcatgaacgaacgtcaattccgtacgttgttcattaaagcaagcaaaatcaaagaaggtaaacacggtgttaacttcatggttttactagaacaacgcttagataacgttgtttaccgtttaggtcttgcaactactcgtcgtcaagcacgtcaattagttaaccatggccacatcactgtagacggcaaacgtgttgatattccatcataccacgttgaagttggtcaagtgatcggtgttcgtgaaaaatctcaaaacatctcaacaattaaagaagcggttgaagcaactgttggacgtccagcattcgtaagctttgacactgaaaaattagaaggtagcttcactcgtttaccagaacgtgatgaactttacccagaaatcgacgaagcacttgtcgttgaatactacaaccaaaaactttaagatttcaaaaggtcgaactacggttatttgggaataaggagaaggataaaatgaatccattaattcaagaattaacacaagaacaattacgtacggatattcctgcgttccgccctggtgacactgttcgcgttcatgcgaaagtagtcgaaggtactcgtgaacgtatccagttattcgaaggtgttgtaattaaacgccgtggtgctggaatcagcgaaacttacacagtacgtaaagtttcaaatggtgttggtgtggaacgtacattcccattacacacaccacgtgttgctcaaattgaagtggttcgctacggtaaagtacgtcgtgcaaaactttactacttacgcgcattacacggaaaagcagctcgtatcaaagaaatcagaagataaacacggaaaacttccttggaaatctaagattttgaggaggaaaattagtcatgccaaaacaaaaaacacaccgcggattagcaaaacgtgtaaaacgtactggtggaggcggcttaaaacgtggccgtgcctttacatctcaccgtttccacggtaaaactaaaaaacaacgccgtcaattgcgtaaagcaagcatggttgcaaaaggcgattacaaacgtatccgccaacaattagcaagaatgaaataaaacaactcggtgacttttagattaccgtcaagagaaacaagatattaggaggaattcaacatggcacgtgttaaaggtggaacagtaacccgtaaacgtcgtaaaaaagtccttaagttagcgaaaggctactacggatcaaaacatactttatttaaatcagcaaaagaacaagtaatgaactcttattactatgcattcagagaccgtcgtcaaaagaaacgtgacttccgtaaattatggattgcacgtatcaacgcggcagctcgcatgaatggcttaagctattctaaattaatgcacggtttgaaattggcagagattgatatcaaccgcaaaatgttagctgacttagccgttaacgatgcagcagcatttacagcgttagctgaacaagcaaaagacgctttaagcaaataagcttaaacaatctttcacaccctacctagaagaaggaggtgctgtatagcatgtacgcaattatcaaaactggtggtaaacaagtgaaagttgaagtaggtcaagcaatctacgttgaaaaattaaacgttgaggctggcgagaaagttgtttttgacgaagttatcttagtaggtggcgaatctacaaaagttggtgcgccaactgttgcaggcgcaactgttgaaggaactgttgaaaaacacggcaaacaaaagaaagtcgtgactttccaatacaaacctaaaaaacactctcaccgtaaacaaggtcaccgtcaaccgtatacaaaagttatgatcgaagcaatcaacgcttaatctctcttgttgacaggaaagaaggcctatcaatgattaaaggttcttttaaacgaacaggctccggccgaatcgtttcattcgaattaaccgggcatgctgaagcaggtccttatggcagcgatgtggtttgcgcggcagtttctgccttagcaattagcacagtcaatgggattgatgccttagcaggttttgaaccgattgtggaagttgatgatgtagaaggtggctacctttatgtcgagatgttaacaactgtcaatcaggaacaaaaaaatattgcccaaattctattagaaaatcttttattaggtttacaatcaatagagaacgaaaatactgaatttattcaaataaaaacaatcactgagaaataggaggtgcagactatgttattgactatgaatttacaattatttgcccataaaaaaggtggcggttctacatcaaacggccgtgactctgaatctaaacgattaggcgctaaaagtgctgatggccaaacagttacaggtggttcaattttataccgtcaacgcggaactaaaatttatccaggtgtgaacgttggaatcggtggcgacgatacgttatttgcaaaagttgacggtgtggtacgtttcgaacgtaaaggccgcgacaaaaaacaagtatcagtttatccagtagctaactaatacgattaaaaagctgaatctccggcattatttcaaggaggaattaggttatgtcagtacaattagaagttaaagaaagagctatccgtccacgttcactaagaaatcagctacgtcacgaagggaaagtacctgccattgtttacggttaccaaattgaaagtacaccaatctattttgaagaaaaagacttatcaaaaattttacgcgaacatggtgctaacaccgttattaaaatgacagttgatggcaaaaacatcaacacattaatgtcgaaagcacagttagatacctttactggtcaaatgcttcatgttgaattcttatctgtaaatatgaaagaaacaacagaagtcgaagcagaagttcaattaattggtgaatctgcaggtgtgaaagctgggggtaccttagctcaaaacttgtacactgttttagtggcagccacaccagacaaattgccagaatcaattgaagtagatattacaaacttagaaattggtgatgctcttacaatcgctgatttacctgaacacaaagactatgaaattttaactgatccagaagaacaactagttgctattgttgaagcacaaactgctcctgaagaagaagaaggaacagctgctgaaacgactgaaccagaattagccgaataaagagtacacttttgttcagctatcaaggcaaaggaggaaacttaaaatggcaaaagtatgttacttcactggtcgtaagacttcaagtggtaataaccgttcacatgcgatgaactcaacaaaacgcactgtgaaacctaacttacaaaaagttcgcgtattaatcgatggtaaacctaaaaaagtttgggtgtcaactcgtgctttgaaatctggtaaaatcgaacgtgtttaataaacttaaataagcaaagctggacgataagtattgaaggaggaaaatttatgcgtcaaaatattattttagaatgtgtcgaaactggagaacgtctgtatctcactagcaaaaataaacggaataaccctgaacggatagaattaaaaaagtattctccaaaattgcgcagacgggcaattttcaaagaagtgaaataggcaagtggtaaaaaggagacaaaattcagggcaaaggagcgaaaaaacgtatgaaacaagatatccatccaaattaccaaccagtagtattcatggattcaacaacaggtttcaaattcctttcaggttcaactaaaggatcttcagaaactgttgaatgggaagatggcaacacttatccattattacgtgttgaggttacttcagactcacacccattctacactggtcgtcaaaaattcacacaagccgacggacgtgtggaccgtttcaacaaaaaatacggtctcaaagacgaaaacgcaaatccagacgcatagtctttcaaaacattgttatgacaagttttataacacaggaggtaataaatatggctgtaccagcgagaagaacatcgaaaacaaaaaaaagattgcgtcgaacacatgaaaaattaaaatcacctgaaatttcgtttgatgagaatcttggtgattatcgtaaaagtcatcatgtatctttaaaaggctattatggtggaaaaaaagtgatggataaaaaataggaggtaatagtattgaagaaaatgattacaatttcaggaggtgtaattgcatgaaaagaacgtatcaaccaaacaaacgtaaacgccaaaaagttcacggattccgtaaacgtatgagcactaaaaatggccgtcgcgtattagcaagccgtcgtcgtaaaggtagaaaagttatttctgcttaatgatggtctggtcttttaaacagtcacttaattaacggcactcctcagccaagtcaaaagcctccggtcggaggcttttgactacatgcccatggcgtttacgccccgccctgccactcatcgcagtactgttgtaattcattaagcattctgccgacatggaagccatcacaaacggcatgatgaacctgaatcgccagcggcatcagcaccttgtcgccttgcgtataatatttgcccatagtgaaaacgggggcgaagaagttgtccatattggccacgtttaaatcaaaactggtgaaactcacccagggattggctgagacgaaaaacatattctcaataaaccctttagggaaataggccaggttttcaccgtaacacgccacatcttgcgaatatatgtgtagaaactgccggaaatcgtcgtggtattcactccagagcgatgaaaacgtttcagtttgctcatggaaaacggtgtaacaagggtgaacactatcccatatcaccagctcaccgtctttcattgccatacggaactccggatgagcattcatcaggcgggcaagaatgtgaataaaggccggataaaacttgtgcttatttttctttacggtctttaaaaaggccgtaatatccagctgaacggtctggttataggtacattgagcaactgactgaaatgcctcaaaatgttctttacgatgccattgggatatatcaacggtggtatatccagtgatttttttctccattttagcttccttagctcctgaaaatctcgataactcaaaaaatacgcccggtagtgatcttatttcattatggtgaaagttggaacctcttacgtgccaagccaaataggccgt

SEQ ID NO: 336 - DNA, 9223 bp, Artificial
  Synthetic
tcagatccttccgtatttagccagtatgttctctagtgtggttcgttgtttttgcgtgagccatgagaacgaaccattgagatcatgcttactttgcatgtcactcaaaaattttgcctcaaaactggtgagctgaatttttgcagttaaagcatcgtgtagtgtttttcttagtccgttacgtaggtaggaatctgatgtaatggttgttggtattttgtcaccattcatttttatctggttgttctcaagttcggttacgagatccatttgtctatctagttcaacttggaaaatcaacgtatcagtcgggcggcctcgcttatcaaccaccaatttcatattgctgtaagtgtttaaatctttacttattggtttcaaaacccattggttaagccttttaaactcatggtagttattttcaagcattaacatgaacttaaattcatcaaggctaatctctatatttgccttgtgagttttcttttgtgttagttcttttaataaccactcataaatcctcatagagtatttgttttcaaaagacttaacatgttccagattatattttatgaatttttttaactggaaaagataaggcaatatctcttcactaaaaactaattctaatttttcgcttgagaacttggcatagtttgtccactggaaaatctcaaagcctttaaccaaaggattcctgatttccacagttctcgtcatcagctctctggttgctttagctaatacaccataagcattttccctactgatgttcatcatctgagcgtattggttataagtgaacgataccgtccgttctttccttgtagggttttcaatcgtggggttgagtagtgccacacagcataaaattagcttggtttcatgctccgttaagtcatagcgactaatcgctagttcatttgctttgaaaacaactaattcagacatacatctcaattggtctaggtgattttaatcactataccaattgagatgggctagtcaatgataattactagtccttttcctttgagttgtgggtatctgtaaattctgctagacctttgctggaaaacttgtaaattctgctagaccctctgtaaattccgctagacctttgtgtgttttttttgtttatattcaagtggttataatttatagaataaagaaagaataaaaaaagataaaaagaatagatcccagccctgtgtataactcactactttagtcagttccgcagtattacaaaaggatgtcgcaaacgctgtttgctcctctacaaaacagaccttaaaaccctaaaggcttaagtagcaccctcgcaagctcgggcaaatcgctgaatattccttttgtctccgaccatcaggcacctgagtcgctgtctttttcgtgacattcagttcgctgcgctcacggctctggcagtgaatgggggtaaatggcactacaggcgccttttatggattcatgcaaggaaactacccataatacaagaaaagcccgtcacgggcttctcagggcgttttatggcgggtctgctatgtggtgctatctgactttttgctgttcagcagttcctgccctctgattttccagtctgaccacttcggattatcccgtgacaggtcattcagactggctaatgcacccagtaaggcagcggtatcatcaacaggcttacccgtcttactgtcaagaggacatccggtcaaataaaacgaaaggctcagtcgaaagactgggcctttcgttttgctgaggagacttagggaccctttatgacaacttgacggctacatcattcactttttcttcacaaccggcacggaactcgctcgggctggccccggtgcattttttaaatacccgcgagaaatagagttgatcgtcaaaaccaacattgcgaccgacggtggcgataggcatccgggtggtgctcaaaagcagcttcgcctggctgatacgttggtcctcgcgccagcttaagacgctaatccctaactgctggcggaaaagatgtgacagacgcgacggcgacaagcaaacatgctgtgcgacgctggcgatatcaaaattgctgtctgccaggtgatcgctgatgtactgacaagcctcgcgtacccgattatccatcggtggatggagcgactcgttaatcgcttccatgcgccgcagtaacaattgctcaagcagatttatcgccagcagctccgaatagcgcccttccccttgcccggcgttaatgatttgcccaaacaggtcgctgaaatgcggctggtgcgcttcatccgggcgaaagaaccccgtattggcaaatattgacggccagttaagccattcatgccagtaggcgcgcggacgaaagtaaacccactggtgataccattcgcgagcctccggatgacgaccgtagtgatgaatctctcctggcgggaacagcaaaatatcacccggtcggcaaacaaattctcgtccctgatttttcaccaccccctgaccgcgaatggtgagattgagaatataacctttcattcccagcggtcggtcgataaaaaaatcgagataaccgttggcctcaatcggcgttaaacccgccaccagatgggcattaaacgagtatcccggcagcaggggatcattttgcgcttcagccatacttttcatactcccaccattcagagaagaaaccaattgtccatattgcatcagacattgccgtcactgcgtcttttactggctcttctcgctaacccaaccggtaaccccgcttattaaaagcattctgtaacaaagcgggaccaaagccatgacaaaaacgcgtaacaaaagtgtctataatcacggcagaaaagtccacattgattatttgcacggcgtcacactttgctatgccatagcatttttatccataagattagcggatcctacctgacgctttttatcgcaactctctactgtttctccatacccgttttacctgcaggtgcagtttgttggcataggaggataagaggcatgacagattttgaagacaaacaagtagcaaacaacgaaacaatggaagatgcaatgaacagcgttcaagaagtcagtgttggcgatattgttaaaggcgaagttttagccattgaagacaaacaagttgttgtcggcattgaaggagcgggcgttgaaggcgttgttcctgcaaaggaattatcgactttaccagttgaagatgtacacgaacttgtgaaagtcggtgatgtgttagatttagttgttatcacatcaattggcaaagataaagaaaacggcagttatttactgtcaaaacgccgtttagatgctaaaaaagtttgggaagaaattgaacaagatttccaagcgggcaaagtaatcgaagcacctgttacaaatgttgttaaaggtggtttggttgttgatgtcggtgttcgcggatttgttcctgcctcaatggttgaagatcattttgttgcagatttttctgaatataaaggtcaaacactagcatttaaaattattgaaatcgaaccttcagaaaaccgcttaattctttcacataaagcagttgttgaagctgaaaaagaatcgaaaaaagaagaattactttcttctttacatgacggagacgttgttgaagggaaagtagctcgtttaacagatttcggcgcattcattgatttaggtggcgtggatggtttagttcatgtttctgaaatcgctcatcagcatgtgggcaaaccaagtgatgcgttaactgttggcgaagacgttcaagtaaaaattctttcaattaatccagaagaaggacgtatttctttatctattaaagaaacattgcctggaccatggacagatatcgaaacaaaagcagccgctgggactgttttagatggcacagtaaaacgcctaacaagcttcggtgcctttgtggaagttttccctggtgtggaaggattagtgcatatttctcaaatttctcacaagcacattgcaacgcctcatgaagttcttcatgaaggggatcaagtacaagtgaaagttttagaagttaatccagaggaacatcgtattgctttaagtatcaaagcgttagaaccaaaacctgagtctcaagaagaaccaaaagaagaacaggaatatgaattgcctgaagaaaatactggctttaccatgggcgatattttaggtgacgctttatctgatgcgaaagaagaggaataacacgttactttcttgaaatttatgaaataatagagaaagaggtggaacaaatggcaatttcacaagaaagaaaaaacgaaatcattaaagaatacgcacgtcatgaaggagatactggttctccagaagtacaaattgctgtcttaactgaagacattaaccaattgaacgaacatgcgcgtacacacaaaaaagatcaccattcttaccgtggtttaatgaaaaaaatcggtcaccgtcgtaacttgttagcttacttacgtaaaactgacatccaacgttaccgcgaattgatccaacgtttaggattacgtcgttaatcattacgtataaagcgaggttcaaacctaaatcatcggaggtgaaacaaatgccaaatatcgaatctgcaatcaaacgcgtacgtacaagtgctaacgcgaatgcgaaaaattcatctcaaacaaacgcaatgcgtacagcaatcaagaaatttgaagaagctgtagctgctggagctgataacgtcgatgctttatacaacgaagctgttaaagctgttgatatggctgcaactaaaggtttaatccataaaaacaaagctaaccgcgataaaattcgtttaagcaaattagctaaataatgtgagatagaagttagcattcatgtaagttaatggaggtgtatttaataatggcagttaaaattcgtttaaaacgtatgggttctaaaaagagtcctttttaccgtattgtagtagctgattctcgttctcctcgtgatggacgtttcatcgaaactgtaggtacttacaaccctttgaaagaccctgcagaagtagttttaaaagaagatttagttttagattggttatctaaaggtgcgcaaccttctgatacagttcgtaacatcctttcaaaagaaggcgttatgaaaaaacatcatgaagctaaaaacgttaagaaataaggtgattgaacatggcagatgtgaagaagtccatagggaggtgaaaatcaatgagtcaagatacgaagtacgaaatcatgtacattattcgtccgaacattgatgaagaagcaaaaactgctttagtagaacgtttcgacacaatcttaaaagataacggagcagaagttatcgaatctaaagattgggaaaaacgccgcttagcatatgaaatgaacggattccgtgaaggcatctatcatatcgttaatgttacttctccatcaacagctggcgcaatcaacgagtttgatcgtttagcaaaaatcaatgacgatattatccgtcatatgatcgtgaaggtagaagcataatttgtttcacatgaaacatttattgacgaatttgataggagggaacaagaatggcacaacaaagaagaggcggacgtaaacgtcggaaagtcgactatatcgcagcaaaccacatcgaatacatcgactataaagatactgaattgttaaaacgattcatttcagaacgtggcaaaattttaccacgtcgtgttacaggtactggcgctaaaaaccaacgtaaattaacgattgctattaaacgcgcacgtatcatgggattattaccattcgttagtgacgaacaataattttatgacaatttccagaaccaaaaaatgtatgaacaggagtgaaggaaatgaaagtcatttttttacaagacgttaaaggaaaaggaaaaaaaggggacgtaaaagaagtgccaactggttacgcccaaaactttttaattaaaaatggttatgcgaaagaagccaataaagggagcatgagtgcgttagcgggtcaaaagaaagcccaagaaaaacatgaagcagaagttttagcacaagcaaaagaaatgcaagcctttttagaagatgaaaagactgttgtagaaatcaaggcaaaagctggagaagacagccgtttatttggctcaattccttcaaaacaaattgcagaagccttaaacaaacaatacaatgtaaaattggataaacgcaaaatcgaattagccaacccaattcgttctctaggttacactaacgtaccagtcaaactacatcatgaagttacagcgaaaattaaggttcatgtcgtagcggaataatacaatcgataaaaaagaagccgatattaaatggtattgtttgccccacaatgagccccggaaactcaagtgtatgtcaaacatcgaaaacaaaattggaggaaagaaacgtgcgtacaacatatatggccaaagctggcgaagtagaacgtaaatggtacgtagtagatgcaacagatgttcctttaggacgtctatcagcagttgttgcttctgtactacgctggtaaaaataaaccaacattcacaccacatgtggatactggagatttcgtaatcgtaattaacgctgataaagtaaaattaacaggtaaaaaagctacagacaaaatttactaccgtcactcaatgtatcctggaggattaaaatcagtgactgctggtgaattacgcgacaaaaactctcgccgtcttatcgaaacttctgtaaaaggtatgctacctaaaaacactttaggacgtaaacaatttactaaattgaacgtatacggtggagctgagcatccacatgctgcacaacaaccagaagtattagatatcacgaacttaatttaaggagggaaattcattggcacaagtacaatatagcggcacaggccgtcgtaaaaatgcagttgcccgcgtacgcttagtaccaggtactggtaaaattactgtaaacaaaaaagacgtagaagaatatattccacatgctgacttgcgtgaagttatcaaccaaccatttggcgtaactgaaacaaaaggcgcttacgatgtaatcgtaaacgtaaacggtggtggctatgctggacaatcaggagctatccgtcacggaatcgctcgtgcattgttacaagtagatcctgacttccgttctgctttaaaacgcgctgggttacttactcgtgacgcacgtatggttgaacgtaaaaaaccaggtcttaagaaagcccgtaaagcttcacagttctcaaaacgttaatatatcttatatatcaacatctcaatttaagctcggagggagggaataacatgtcaaaaacagtcgttcgtaaaaacgaatctcttgatgatgctcttcgtcgcttcaaacgttccgtttcaaaagcgggtactttacaagaatcacgtaaacgtgaattctacgaaaaaccaagtgtaaagcgtaagaaaaaatctgaagcagctagaaaacgtaaaaaattctagttttgaatgaattggagttggtggtaaaaccaaactggaggaaacacaacatggcagtaatttctatgaaacaattactagaagccggcgtacactttggtcaccaaactcgtcgctggaacccaaaaatgaagaaatatatcttcacagaaagaaacggtatctacatcattgacttacaaaaaacagtgaaattagtagatgcagcttacgattacatgaaaaacgttgcagaagaaggcggcgttgctttattcgtaggaactaaaaaacaagcacaagaagcaatcaaagatgaagcaatccgcgctggtcaatactatgtaaaccatcgttggttaggtggtacgttaactaactgggatacaatccaaaaacgtattgctcgcttgaaaaaaatcaatgcaatggaagaagacggcactttcgaagttttacctaagaaagaagttgctggcttaaacaaagaacgtgaacgtttagaaaaattcttaggtggtatcgctgatatgccaagaattccagatgtaatgtacatcgttgacccgcgtaaagaacgcattgctgttcaagaagcacacaaattaaacattcctatcgttgcaatggttgatacaaactgtgatcctgatgagatcgatgttgtaatcccttcaaatgatgatgcaatccgcgctgtgaaattaatcactgctaaaatggctgacgctttcatcgaaggtaaccaaggggaagaccaagcaactgaagagttattcgttgaagaaacaccagaagcaacttcaatcgaagaaatcgttgatgttgttgaaggaaacaacgaatcagctgaataataatgattacggagctgtctcaaagacttaattaacggcactcctcagccaagtcaaaagcctccggtcggaggcttttgactacatgcccatggcgtttacgccccgccctgccactcatcgcagtactgttgtaattcattaagcattctgccgacatggaagccatcacaaacggcatgatgaacctgaatcgccagcggcatcagcaccttgtcgccttgcgtataatatttgcccatagtgaaaacgggggcgaagaagttgtccatattggccacgtttaaatcaaaactggtgaaactcacccagggattggctgagacgaaaaacatattctcaataaaccctttagggaaataggccaggttttcaccgtaacacgccacatcttgcgaatatatgtgtagaaactgccggaaatcgtcgtggtattcactccagagcgatgaaaacgtttcagtttgctcatggaaaacggtgtaacaagggtgaacactatcccatatcaccagctcaccgtctttcattgccatacggaactccggatgagcattcatcaggcgggcaagaatgtgaataaaggccggataaaacttgtgcttatttttctttacggtctttaaaaaggccgtaatatccagctgaacggtctggttataggtacattgagcaactgactgaaatgcctcaaaatgttctttacgatgccattgggatatatcaacggtggtatatccagtgatttttttctccattttagcttccttagctcctgaaaatctcgataactcaaaaaatacgcccggtagtgatcttatttcattatggtgaaagttggaacctcttacgtgccaagccaaataggccgt

SEQ ID NO: 337 - DNA, 6371 bp, Artificial
  Synthetic
tcagatccttccgtatttagccagtatgttctctagtgtggttcgttgtttttgcgtgagccatgagaacgaaccattgagatcatgcttactttgcatgtcactcaaaaattttgcctcaaaactggtgagctgaatttttgcagttaaagcatcgtgtagtgtttttcttagtccgttacgtaggtaggaatctgatgtaatggttgttggtattttgtcaccattcatttttatctggttgttctcaagttcggttacgagatccatttgtctatctagttcaacttggaaaatcaacgtatcagtcgggcggcctcgcttatcaaccaccaatttcatattgctgtaagtgtttaaatctttacttattggtttcaaaacccattggttaagccttttaaactcatggtagttattttcaagcattaacatgaacttaaattcatcaaggctaatctctatatttgccttgtgagttttcttttgtgttagttcttttaataaccactcataaatcctcatagagtatttgttttcaaaagacttaacatgttccagattatattttatgaatttttttaactggaaaagataaggcaatatctcttcactaaaaactaattctaatttttcgcttgagaacttggcatagtttgtccactggaaaatctcaaagcctttaaccaaaggattcctgatttccacagttctcgtcatcagctctctggttgctttagctaatacaccataagcattttccctactgatgttcatcatctgagcgtattggttataagtgaacgataccgtccgttctttccttgtagggttttcaatcgtggggttgagtagtgccacacagcataaaattagcttggtttcatgctccgttaagtcatagcgactaatcgctagttcatttgctttgaaaacaactaattcagacatacatctcaattggtctaggtgattttaatcactataccaattgagatgggctagtcaatgataattactagtccttttcctttgagttgtgggtatctgtaaattctgctagacctttgctggaaaacttgtaaattctgctagaccctctgtaaattccgctagacctttgtgtgttttttttgtttatattcaagtggttataatttatagaataaagaaagaataaaaaaagataaaaagaatagatcccagccctgtgtataactcactactttagtcagttccgcagtattacaaaaggatgtcgcaaacgctgtttgctcctctacaaaacagaccttaaaaccctaaaggcttaagtagcaccctcgcaagctcgggcaaatcgctgaatattccttttgtctccgaccatcaggcacctgagtcgctgtctttttcgtgacattcagttcgctgcgctcacggctctggcagtgaatgggggtaaatggcactacaggcgccttttatggattcatgcaaggaaactacccataatacaagaaaagcccgtcacgggcttctcagggcgttttatggcgggtctgctatgtggtgctatctgactttttgctgttcagcagttcctgccctctgattttccagtctgaccacttcggattatcccgtgacaggtcattcagactggctaatgcacccagtaaggcagcggtatcatcaacaggcttacccgtcttactgtcaagaggacatccggtcaaataaaacgaaaggctcagtcgaaagactgggcctttcgttttgctgaggagacttagggaccctttatgacaacttgacggctacatcattcactttttcttcacaaccggcacggaactcgctcgggctggccccggtgcattttttaaatacccgcgagaaatagagttgatcgtcaaaaccaacattgcgaccgacggtggcgataggcatccgggtggtgctcaaaagcagcttcgcctggctgatacgttggtcctcgcgccagcttaagacgctaatccctaactgctggcggaaaagatgtgacagacgcgacggcgacaagcaaacatgctgtgcgacgctggcgatatcaaaattgctgtctgccaggtgatcgctgatgtactgacaagcctcgcgtacccgattatccatcggtggatggagcgactcgttaatcgcttccatgcgccgcagtaacaattgctcaagcagatttatcgccagcagctccgaatagcgcccttccccttgcccggcgttaatgatttgcccaaacaggtcgctgaaatgcggctggtgcgcttcatccgggcgaaagaaccccgtattggcaaatattgacggccagttaagccattcatgccagtaggcgcgcggacgaaagtaaacccactggtgataccattcgcgagcctccggatgacgaccgtagtgatgaatctctcctggcgggaacagcaaaatatcacccggtcggcaaacaaattctcgtccctgatttttcaccaccccctgaccgcgaatggtgagattgagaatataacctttcattcccagcggtcggtcgataaaaaaatcgagataaccgttggcctcaatcggcgttaaacccgccaccagatgggcattaaacgagtatcccggcagcaggggatcattttgcgcttcagccatacttttcatactcccaccattcagagaagaaaccaattgtccatattgcatcagacattgccgtcactgcgtcttttactggctcttctcgctaacccaaccggtaaccccgcttattaaaagcattctgtaacaaagcgggaccaaagccatgacaaaaacgcgtaacaaaagtgtctataatcacggcagaaaagtccacattgattatttgcacggcgtcacactttgctatgccatagcatttttatccataagattagcggatcctacctgacgctttttatcgcaactctctactgtttctccatacccgttttacctgcaggtgcagtcacgagaacttaaggaggtattttcgtggctaaaaaagtagaaaaaatcgttaaattacaaattcctgcggggaaagcaacaccagctccaccagtaggtccagcgttaggtcaagcaggtatcaacatcatgggattcactaaagaattcaatgctcgtacagctgaccaagcaggcttaattattccagtagtaatctctgtatatgaagatcgttcatttacattcattactaaaacaccacctgctgcagtcttattgaaaaaagctgcaaaaatcgaaaaaggttcaggtgaaccaaacaaaactaaagttgcaacagtttcaagcgatcaagtgaaagaaatcgctgaacttaaaatggcagacctaaacgccgctgacgttgaagcagcaatgcgcatggttgcaggaactgcacgaagcatgggtatcatcgtagaataatttttattccacacttactcaaagaagtagcttctcagttcgtttcatatttaaagatatgaaagacgtgggaggtacaaccgttataaccacaatcaaggaggaaacaaaatggctaaaaagagcaaaaaaatgcaagaagcattgaaaaaagttgatgctacaaaagcttactcagttgaagaagcagtagctttagcaaaagatacaaacatcgcgaaatttgacgcaacagttgaagttgcttacaaattgaacgttgaccctaaaaaagcagaccaacaaatccgtggagcagttgtgcttccaaacggaactggtaaaacacaaactgttttagtattcgctaaaggcgaaaaagctaaagaagctgaagctgctggtgcagatttcgtaggcgacgacgacatggttgcaaaaatccaaggtggatggttcgactttgacgtagttgttgcgactcctgacatgatggctacagttggtaaattaggccgtgtcttaggaccaaaaggtttaatgccaaaccctaaaacgggtactgtaacaatggacgttacaaaagctgttgaagaagttaaagctggtaaagtaacttaccgcgttgacaaagctggtaacatccacgtaccaatcggtaaagtttcatttgataacgaaaaattggttgaaaacttcaacacaattaacgacgtattattgaaagctaaaccatcaactgctaaaggtcaatacatcaaaaacatttcagtaacaacaacatttggacctggaatccacgttgaccaagcttctttctaatttgaaagaaaataattaaaaaattcttgactcactcacttaccctatggtaaagtgagtgaggttaataattaactgtaccgaagacagtaggtgacgcaagtcttaatttcctaccgaggacaattgttgagttatatacaattcggtccctctatgtctacggtggcatggagttttgttgttttacacgactttttgaaaaaaagccgatgtaaaacaatacttggcgaacgaagtgagcgaagtttcatttgattcttctactttacataacgtaaaccaagtccaactccaccatcaaaatcaggaggtgaaataaatgagtgaagcagcaatcgctaaaaaagaaaccctagttcaagcagccgctgagaaatttgaatcagcagcatcagttgtaatcgtggactaccgtggtttaacagttgaagaagtcactaacttacgtaaacaattacgtgatgcaggcgtagaaatgaaagtcatcaaaaactcaatcctttctcgtgcagctaaaaaagttggtttagacggcttagacgaagtctttacaggcccaactgctgtcgcattcagcaacgacgatgtagtagcaccagctaaaatcatcgacgaatttgctaaagatgcaaaagcattagaaatcaaaggtggcgtcatcgaaggaaaagtttcttcagtggaacaaattactgcgttggcaaaactaccaaaccgcgaaggtttactatctatgctattatctgtattacaagcgccagtccgcaacgtggcttacgctgtcaaagcagtggcagagaaaaacgaagaagttgcttaattgcagtctaattcaaaccaataaaaaacaaacaattttaatttaaatggaggaaattcaaaatggcattaaacattgaaaacatcgttgctgagttagaaacagcaactatcttagaactaagcgaattagttaaagctatcgaagaaaaatttgacgtatcagcagcagctcctgtagcagtagctggaccagcagcaggtggagcagcagaagaacaaactgaattcactgttgaattaacagcagctggcgatcaaaaagttaaagttatcaaagcagttcgtgaagcaactggcttaggcttgaaagaagctaaagctgtagttgatggcgctcctgcaccagttaaagaagctgtttctaaagaagaagcagaagctttaaaagctgctttagaagaagttggcgcttcagtaacagtaaaataattcattcaacttttgaatgttcgagacttaattaacggcactcctcagccaagtcaaaagcctccggtcggaggcttttgactacatgcccatggcgtttacgccccgccctgccactcatcgcagtactgttgtaattcattaagcattctgccgacatggaagccatcacaaacggcatgatgaacctgaatcgccagcggcatcagcaccttgtcgccttgcgtataatatttgcccatagtgaaaacgggggcgaagaagttgtccatattggccacgtttaaatcaaaactggtgaaactcacccagggattggctgagacgaaaaacatattctcaataaaccctttagggaaataggccaggttttcaccgtaacacgccacatcttgcgaatatatgtgtagaaactgccggaaatcgtcgtggtattcactccagagcgatgaaaacgtttcagtttgctcatggaaaacggtgtaacaagggtgaacactatcccatatcaccagctcaccgtctttcattgccatacggaactccggatgagcattcatcaggcgggcaagaatgtgaataaaggccggataaaacttgtgcttatttttctttacggtctttaaaaaggccgtaatatccagctgaacggtctggttataggtacattgagcaactgactgaaatgcctcaaaatgttctttacgatgccattgggatatatcaacggtggtatatccagtgatttttttctccattttagcttccttagctcctgaaaatctcgataactcaaaaaatacgcccggtagtgatcttatttcattatggtgaaagttggaacctcttacgtgccaagccaaataggccgt

SEQ ID NO: 338 - DNA, 8336 bp, Artificial
  Synthetic
tcagatccttccgtatttagccagtatgttctctagtgtggttcgttgtttttgcgtgagccatgagaacgaaccattgagatcatgcttactttgcatgtcactcaaaaattttgcctcaaaactggtgagctgaatttttgcagttaaagcatcgtgtagtgtttttcttagtccgttacgtaggtaggaatctgatgtaatggttgttggtattttgtcaccattcatttttatctggttgttctcaagttcggttacgagatccatttgtctatctagttcaacttggaaaatcaacgtatcagtcgggcggcctcgcttatcaaccaccaatttcatattgctgtaagtgtttaaatctttacttattggtttcaaaacccattggttaagccttttaaactcatggtagttattttcaagcattaacatgaacttaaattcatcaaggctaatctctatatttgccttgtgagttttcttttgtgttagttcttttaataaccactcataaatcctcatagagtatttgttttcaaaagacttaacatgttccagattatattttatgaatttttttaactggaaaagataaggcaatatctcttcactaaaaactaattctaatttttcgcttgagaacttggcatagtttgtccactggaaaatctcaaagcctttaaccaaaggattcctgatttccacagttctcgtcatcagctctctggttgctttagctaatacaccataagcattttccctactgatgttcatcatctgagcgtattggttataagtgaacgataccgtccgttctttccttgtagggttttcaatcgtggggttgagtagtgccacacagcataaaattagcttggtttcatgctccgttaagtcatagcgactaatcgctagttcatttgctttgaaaacaactaattcagacatacatctcaattggtctaggtgattttaatcactataccaattgagatgggctagtcaatgataattactagtccttttcctttgagttgtgggtatctgtaaattctgctagacctttgctggaaaacttgtaaattctgctagaccctctgtaaattccgctagacctttgtgtgttttttttgtttatattcaagtggttataatttatagaataaagaaagaataaaaaaagataaaaagaatagatcccagccctgtgtataactcactactttagtcagttccgcagtattacaaaaggatgtcgcaaacgctgtttgctcctctacaaaacagaccttaaaaccctaaaggcttaagtagcaccctcgcaagctcgggcaaatcgctgaatattccttttgtctccgaccatcaggcacctgagtcgctgtctttttcgtgacattcagttcgctgcgctcacggctctggcagtgaatgggggtaaatggcactacaggcgccttttatggattcatgcaaggaaactacccataatacaagaaaagcccgtcacgggcttctcagggcgttttatggcgggtctgctatgtggtgctatctgactttttgctgttcagcagttcctgccctctgattttccagtctgaccacttcggattatcccgtgacaggtcattcagactggctaatgcccccagtaaggcagcggtatcatcaacaggcttacccgtcttactgtcaagaggacatccggtcaaataaaacgaaaggctcagtcgaaagactgggcctttcgttttgctgaggagacttagggaccctttatgacaacttgacggctacatcattcactttttcttcacaaccggcacggaactcgctcgggctggccccggtgcattttttaaatacccgcgagaaatagagttgatcgtcaaaaccaacattgcgaccgacggtggcgataggcatccgggtggtgctcaaaagcagcttcgcctggctgatacgttggtcctcgcgccagcttaagacgctaatccctaactgctggcggaaaagatgtgacagacgcgacggcgacaagcaaacatgctgtgcgacgctggcgatatcaaaattgctgtctgccaggtgatcgctgatgtactgacaagcctcgcgtacccgattatccatcggtggatggagcgactcgttaatcgcttccatgcgccgcagtaacaattgctcaagcagatttatcgccagcagctccgaatagcgcccttccccttgcccggcgttaatgatttgcccaaacaggtcgctgaaatgcggctggtgcgcttcatccgggcgaaagaaccccgtattggcaaatattgacggccagttaagccattcatgccagtaggcgcgcggacgaaagtaaacccactggtgataccattcgcgagcctccggatgacgaccgtagtgatgaatctctcctggcgggaacagcaaaatatcacccggtcggcaaacaaattctcgtccctgatttttcaccaccccctgaccgcgaatggtgagattgagaatataacctttcattcccagcggtcggtcgataaaaaaatcgagataaccgttggcctcaatcggcgttaaacccgccaccagatgggcattaaacgagtatcccggcagcaggggatcattttgcgcttcagccatacttttcatactcccaccattcagagaagaaaccaattgtccatattgcatcagacattgccgtcactgcgtcttttactggctcttctcgctaacccaaccggtaaccccgcttattaaaagcattctgtaacaaagcgggaccaaagccatgacaaaaacgcgtaacaaaagtgtctataatcacggcagaaaagtccacattgattatttgcacggcgtcacactttgctatgccatagcatttttatccataagattagcggatcctacctgacgctttttatcgcaactctctactgtttctccatacccgttttacctgcaggtgcagtaagtaaggaaggaggagaacaaggaatgcctacaattaaccaattagtacgtaaacctcgtaaatctaaagtagaaaaatctgattcaccagccttaaacaaaggatataacagttttaagaaaactcaaacaaacgttaactctccgcaaaaacgtggagtttgtacacgtgtgggtacgatgacacctaaaaaaccgaactcagctttacgtaaatatgcccgtgttcgtttgtcaaacttaatcgaagttacagcttatatcccaggtatcggtcacaacttacaagaacacagcgtggtattattacgtggtggacgtgtaaaagacttaccaggggtacgttaccatatcgttcgtggtgcgcttgatactgccggtgttaacgaccgtaaacaaagccgctctaaatacggtacaaaacgtcctaaagcttaattataataagacaataacaacttgaaaaatcatatttcggaaggaggagttacggatgcctcgtaaaggtcctgttgcaaaacgtgatgttttaccagatccaatttataactcaaaattagtaactcgcttaatcaaccgtgtaatggttgacggtaaacgcgggattgctgctaacattatctataattcatttgatatcatcaaagaatctacaggtaacgatccattggaagtttttgaacaagcaatgaaaaacgttatgcctgttcttgaagttaaagcacgtcgtgttgggggttctaactaccaagttccagttgaagttcgtccagaacgtcgtacaactttaggtttacgttgggtagttaactacgcacgtctacgtggtgaacacacaatggaagaacgtctagcgaaagaaatcatggatgctgctaacaacactggcgcttctgttaaaaaacgcgaagacacacacaaaatggcagacgcaaaccgcgcatttgctcattatcgttggtaagatcctctctgtctgtcgcgtaaagtggcagcagaaagtcaatttacaatcgatttaaataaagagaggagtaaacatacaaaatggcaagagaattttcacttgaaaaaactcgtaacattggtatcatggcccacgttgatgctggtaaaacaacaacaactgagcgtatcttgtactacactggtaaaatccataaaatcggtgaaacccatgaaggtgcttcacaaatggactggatggaacaagaacaagaacgtggtatcacgattacatccgctgcgacaactgcacagtggaaaggctaccgtgtaaatatcatcgatactccaggacacgtggacttcacaattgaagtacaacgttctctacgcgtattagatggtgcggtaacagttcttgactctcaatcaggtgtagaacctcaaacagaaactgtttggcgtcaagcgactgaatataaagttcctcgtattgtattctgtaacaaaatggataaaatcggtgcggacttcttctattcagtagaatcattacatgatcgtttacaagcaaacgctcatccaattcaaattccaatcggagctgaagaagacttcactggaatcattgacttgattaaaatgaaagctgaaatctacacaaatgatttgggaacagatattcaagaaactgatattcctgaagattatttagaaaaagcgcaagaatggcgcgaaaaattagttgaagctgttgctgaaactgacgaagacttaatgatgaaatatcttgaaggtgaagaaatcactgaagaagaattagtcgctggtatccgtcaagcaacaatcaacgttgagttcttccctgtattagctggttcagcattcaagaataaaggggttcaattaatgttggacgctgttcttgattacttaccatctccattagatatcgatgctatcaaagggatcgatactaaaacagacgaagaaacaactcgtccagctgatgacgaagcacctttcgcttcattagcatttaaagttatgactgacccattcgtaggtcgtttaactttcttccgtgtttattctggtgtccttgaaagtggttcatacgtattgaacgcttcaaaaggcaaaaaagaacgtatcggtcgtatcctacaaatgcacgccaacactcgtcaagaaattgacaaagtgtactctggtgatatcgctgctgctgttggtctaaaagacacaacaactggtgatacattatgtgcattagatgcaccagttattcttgaatctattgaattccctgacccagttatccaagtcgctgttgaacctaaatcaaaagctgaccaagataaaatgggcgtggctctacaaaaacttgctgaagaagatccatcattccgcgttgaaacaaacgttgaaactggtgaaacagttatctctggtatgggtgaattgcacttagacgttttagtagaccgtatgaaacgtgaattcaaagttgaagctaacgtaggtgctcctcaagtatcttaccgcgaaacattccgtgctgcgactaaagcagaaggtaaattcgttcgtcagtctggtggtaaaggacaatacggtcacgtatgggttgaatttacaccaaatgaagaaggtaaaggcttcgagtttgaaaacgcaattgtcggtggtgtggttcctcgtgaatacatcccagcagttgaaaaagggttagaagactctatgaacaacggtgttcttgctggttatccattagttgatatcaaagcaaaactttacgatggttcataccacgatgtcgattcaaatgaaacggccttccgtgtagctgcttctatggcattgaaagctgcggctaaaaatgcaaacccagttattttagaaccaatgatgaaagttacaattactgttcctgaagattacttaggtgatatcatgggacacgtaacaagtcgtcgtggacgtgttgaaggtatggaagcacacggtaactctcaaatcgttaatgcgatggtacctttagctgaaatgtttggttatgctacaacattacgttcagcaacacaaggacgtggtacatttatgatggtatttgaccactatgaagacgtacctaagtctgttcaagaagaaatcatcaagaaaaacggcggcaacgcataattttccttgagaataaaaggtttgtttttagaactatccttttttcaagatttcgtgtaaaatagcttatgatgatcagacgatttttagtaacgtctatcacatataaaacaaacaataaaatttatatttttaggaggaacattcaaaatggcaaaagaaaaatttgaccgttctaaatcccatgttaacattggtactatcggacacgttgaccatggtaaaactacattaacagctgcaattgctactgtattatcaaaacacggtggcggggaagcacaaagctacgattctatcgataacgctccagaagaaaaagaacgtggaatcacaatcaacacttctcatatcgaatatgaaactgaaactcgtcactatgcacacgttgactgcccaggacatgcggactacgttaaaaacatgatcactggtgctgctcaaatggacggagctatcttagtagtttctgctgctgatggtcctatgcctcaaacacgtgaacatatcttattatcacgtaacgttggtgtaccatacatcgttgtattcttaaacaaaatggatatggttgatgacgaagaattattagaattagtagaaatggaagttcgtgacttattatcagaatacgatttcccaggcgatgatgttccagttatcgcaggttctgctttgaaagctttagaaggcgacgagtcttatgaagaaaaaatcttagaattaatggctgcagttgacgaatatatcccaactccagaacgtgatactgacaaaccattcatgatgccagtcgaagacgtattctcaatcactggacgtggtactgttgctacaggccgtgttgaacgtggtgaagttcgcgttggtgacgaagttgaaatcgttggtattaaagacgaaacatctaaaacaactgttacaggtgttgaaatgttccgtaaattattagactacgctgaagcaggcgacaacatcggtgctttattacgtggtgtagcacgtgaagatatcgaacgtggacaagtattagctaaaccagctacaatcactccacacacaaaattcaaagctgaagtatacgtattatcaaaagaagaaggcggacgtcacactccattcttcactaactaccgtcctcaattctacttccgtacaacagacgttactggtgttgtagaattgccagaaggtactgaaatggtaatgcctggtgataacgttgctatggacgttgaattaattcacccaatcgctatcgaagacggaactcgtttctctattcgtgaaggcggacgtactgtaggttcaggcgttgttactgaaatcgttaaataattaactttttaactatagttttaacacttaattaacggcactcctcagccaagtcaaaagcctccggtcggaggcttttgactacatgcccatggcgtttacgccccgccctgccactcatcgcagtactgttgtaattcattaagcattctgccgacatggaagccatcacaaacggcatgatgaacctgaatcgccagcggcatcagcaccttgtcgccttgcgtataatatttgcccatagtgaaaacgggggcgaagaagttgtccatattggccacgtttaaatcaaaactggtgaaactcacccagggattggctgagacgaaaaacatattctcaataaaccctttagggaaataggccaggttttcaccgtaacacgccacatcttgcgaatatatgtgtagaaactgccggaaatcgtcgtggtattcactccagagcgatgaaaacgtttcagtttgctcatggaaaacggtgtaacaagggtgaacactatcccatatcaccagctcaccgtctttcattgccatacggaactccggatgagcattcatcaggcgggcaagaatgtgaataaaggccggataaaacttgtgcttatttttctttacggtctttaaaaaggccgtaatatccagctgaacggtctggttataggtacattgagcaactgactgaaatgcctcaaaatgttctttacgatgccattgggatatatcaacggtggtatatccagtgatttttttctccattttagcttccttagctcctgaaaatctcgataactcaaaaaatacgcccggtagtgatcttatttcattatggtgaaagttggaacctcttacgtgccaagccaaataggccgt

SEQ ID NO: 339 - DNA, 6288 bp, Artificial
  Synthetic
tcagatccttccgtatttagccagtatgttctctagtgtggttcgttgtttttgcgtgagccatgagaacgaaccattgagatcatgcttactttgcatgtcactcaaaaattttgcctcaaaactggtgagctgaatttttgcagttaaagcatcgtgtagtgtttttcttagtccgttacgtaggtaggaatctgatgtaatggttgttggtattttgtcaccattcatttttatctggttgttctcaagttcggttacgagatccatttgtctatctagttcaacttggaaaatcaacgtatcagtcgggcggcctcgcttatcaaccaccaatttcatattgctgtaagtgtttaaatctttacttattggtttcaaaacccattggttaagccttttaaactcatggtagttattttcaagcattaacatgaacttaaattcatcaaggctaatctctatatttgccttgtgagttttcttttgtgttagttcttttaataaccactcataaatcctcatagagtatttgttttcaaaagacttaacatgttccagattatattttatgaatttttttaactggaaaagataaggcaatatctcttcactaaaaactaattctaatttttcgcttgagaacttggcatagtttgtccactggaaaatctcaaagcctttaaccaaaggattcctgatttccacagttctcgtcatcagctctctggttgctttagctaatacaccataagcattttccctactgatgttcatcatctgagcgtattggttataagtgaacgataccgtccgttctttccttgtagggttttcaatcgtggggttgagtagtgccacacagcataaaattagcttggtttcatgctccgttaagtcatagcgactaatcgctagttcatttgctttgaaaacaactaattcagacatacatctcaattggtctaggtgattttaatcactataccaattgagatgggctagtcaatgataattactagtccttttcctttgagttgtgggtatctgtaaattctgctagacctttgctggaaaacttgtaaattctgctagaccctctgtaaattccgctagacctttgtgtgttttttttgtttatattcaagtggttataatttatagaataaagaaagaataaaaaaagataaaaagaatagatcccagccctgtgtataactcactactttagtcagttccgcagtattacaaaaggatgtcgcaaacgctgtttgctcctctacaaaacagaccttaaaaccctaaaggcttaagtagcaccctcgcaagctcgggcaaatcgctgaatattccttttgtctccgaccatcaggcacctgagtcgctgtctttttcgtgacattcagttcgctgcgctcacggctctggcagtgaatgggggtaaatggcactacaggcgccttttatggattcatgcaaggaaactacccataatacaagaaaagcccgtcacgggcttctcagggcgttttatggcgggtctgctatgtggtgctatctgactttttgctgttcagcagttcctgccctctgattttccagtctgaccacttcggattatcccgtgacaggtcattcagactggctaatgcacccagtaaggcagcggtatcatcaacaggcttacccgtcttactgtcaagaggacatccggtcaaataaaacgaaaggctcagtcgaaagactgggcctttcgttttgctgaggagacttagggaccctttatgacaacttgacggctacatcattcactttttcttcacaaccggcacggaactcgctcgggctggccccggtgcattttttaaatacccgcgagaaatagagttgatcgtcaaaaccaacattgcgaccgacggtggcgataggcatccgggtggtgctcaaaagcagcttcgcctggctgatacgttggtcctcgcgccagcttaagacgctaatccctaactgctggcggaaaagatgtgacagacgcgacggcgacaagcaaacatgctgtgcgacgctggcgatatcaaaattgctgtctgccaggtgatcgctgatgtactgacaagcctcgcgtacccgattatccatcggtggatggagcgactcgttaatcgcttccatgcgccgcagtaacaattgctcaagcagatttatcgccagcagctccgaatagcgcccttccccttgcccggcgttaatgatttgcccaaacaggtcgctgaaatgcggctggtgcgcttcatccgggcgaaagaaccccgtattggcaaatattgacggccagttaagccattcatgccagtaggcgcgcggacgaaagtaaacccactggtgataccattcgcgagcctccggatgacgaccgtagtgatgaatctctcctggcgggaacagcaaaatatcacccggtcggcaaacaaattctcgtccctgatttttcaccaccccctgaccgcgaatggtgagattgagaatataacctttcattcccagcggtcggtcgataaaaaaatcgagataaccgttggcctcaatcggcgttaaacccgccaccagatgggcattaaacgagtatcccggcagcaggggatcattttgcgcttcagccatacttttcatactcccaccattcagagaagaaaccaattgtccatattgcatcagacattgccgtcactgcgtcttttactggctcttctcgctaacccaaccggtaaccccgcttattaaaagcattctgtaacaaagcgggaccaaagccatgacaaaaacgcgtaacaaaagtgtctataatcacggcagaaaagtccacattgattatttgcacggcgtcacactttgctatgccatagcatttttatccataagattagcggatcctacctgacgctttttatcgcaactctctactgtttctccatacccgttttacctgcaggtgcagtccgtaaaaccacaggaggtattatcatgaaagtaagaccatcagtaaaaccaatgtgtgaacattgtaaagtaattcgccgtaaaggacgtgttatggttatttgcccagcaaatccaaaacataaacaacgtcaaggataattaggaggtgtaacgaataatggctcgtattgcaggagtagacatccctcgtgacaaacgtgtagtagtttctcttacttacatttatggtattggtaacactacagctaaaaaagttttagcaaacgttggcgtatctgaagatgttcgtgtacgtgatttaacaaacgaacaaacagatgcgattcgtgcggaaattgataagttaaaagttgaaggggatcttcgtcgtgaagtgaacttaaacatcaaacgcttgatggaaatcggttcataccgtggaatccgtcaccgtcgtggattaccaactcgtggacaaaacacgaaaaataatgcacgtactcgtaaaggccctactaaaacagtagcaggcaagaaaaaataattcctaagtgaaggaggttagaacttcatggcagcaaaaaaagttagtcgtaaacgccgtgtcaaaaagaatatagaatcaggtgtagcacatatccattctacattcaacaatacaatcgtaatgattactgatacacatggtaatgcattagcatggtcatcagcaggatcattaggctttaaaggaagcaaaaaatcaactccttttgccgctcaaatggctgcagaagccgcaactaaagtggcaatggaacatggacttaaaactgtagacgtaacagttaaaggacctggttctggacgtgaagcagcaattcgttcattacaagcaacaggtttagaagtgactgcaattcgtgacgtgactccagttcctcataatggatgccgccctccaaaacgccgtcgtgtttaatgagcgccactcattctgagtttgaattaggaacgtcattgaacaagacacttttcgttttgaaaggggtatagataagaatgattgaatttgaaaaaccaagaatcgaaaaaattgatgaaaatagagattatggtaagttcgtcgttgaaccattagaacgcggttacggaactactttaggtaactctctacgtcgtattttattgtcttctttaccaggagctgcaattacgaatattcaaatcgatggtgttttacacgaattctcaaccattccaggtgtacgagaagacgtaacacaaattattttgaatattaaaggcttagcattgaaattatatgctgaagaagagaaaacccttgagatcgatattacaggacccgctaccgtgactgccggcgatattatcgtggacagtgatgttgagatcctaaataaagatttagttatctgtagtgttgctgaaggagctactttccatgctcgcttaacagtgaaacctggtcgtggctatgttcaagcagacgaaaacaaaaaagaagatatgccaatcggtgtacttccagttgattccatctacacacccgttcttcgtgttaactaccaagtagaaaatacacgtgttggtcgtcgtgatgatttcgacaaattaacaatggaaatatggacagatggttcaatcattcctcaagaagcactaagtttagctgcgaaaatcatgactgagcatttagatatctttgtaaaccttactgacgaagcgaaaaacgctgaaatcatggtggaaaaagaagaaactcaaaaagagaaaatgctagaaatgacgattgaagaacttgatttatcagttcgttcatataactgtttaaaacgtgcaggcattaatactgtacaagaacttacaaacaaatctgaaccagaaatgatcaaagtacgtaatttaggtcgtaaatctcttgaagaagtaaaacttaaattgcatgatctagggttaggattacgtaaggacgattaagacttttacgaagtttccagtcctgcttaacagcagtggctcgtgagaacagaaacgaaggagggaacccaacgtgagttaccgtaaattaggacgcacatcaagccaacgtaaagctatgctacgtgatattacaactgatttaatcatcaacgaacgcatcgtaactactgaagctcgtgcgaaagaagtacgttcaactgtagaaaaaatgattactttaggtaaacgtggagatcttcatgcacgtcgtcaagcagctactttcgttcgtaatgaagttgctagtgttcgtgaagaagatgagtctatcgttgttgaatcagctttacaaaagctatttaacgatttaggacctcgtttcgcggaacgccaaggtggttacactcgtatcttgaagacagaaccaagacgcggcgatgcagcaccaatggtagttatcgaatttgttaaataattaataaaccgatcactttatagatacttaattaacggcactcctcagccaagtcaaaagcctccggtcggaggcttttgactacatgcccatggcgtttacgccccgccctgccactcatcgcagtactgttgtaattcattaagcattctgccgacatggaagccatcacaaacggcatgatgaacctgaatcgccagcggcatcagcaccttgtcgccttgcgtataatatttgcccatagtgaaaacgggggcgaagaagttgtccatattggccacgtttaaatcaaaactggtgaaactcacccagggattggctgagacgaaaaacatattctcaataaaccctttagggaaataggccaggttttcaccgtaacacgccacatcttgcgaatatatgtgtagaaactgccggaaatcgtcgtggtattcactccagagcgatgaaaacgtttcagtttgctcatggaaaacggtgtaacaagggtgaacactatcccatatcaccagctcaccgtctttcattgccatacggaactccggatgagcattcatcaggcgggcaagaatgtgaataaaggccggataaaacttgtgcttatttttctttacggtctttaaaaaggccgtaatatccagctgaacggtctggttataggtacattgagcaactgactgaaatgcctcaaaatgttctttacgatgccattgggatatatcaacggtggtatatccagtgatttttttctccattttagcttccttagctcctgaaaatctcgataactcaaaaaatacgcccggtagtgatcttatttcattatggtgaaagttggaacctcttacgtgccaagccaaataggccgt

SEQ ID NO: 340 - DNA, 8100 bp, Artificial
  Synthetic
tcagatccttccgtatttagccagtatgttctctagtgtggttcgttgtttttgcgtgagccatgagaacgaaccattgagatcatgcttactttgcatgtcactcaaaaattttgcctcaaaactggtgagctgaatttttgcagttaaagcatcgtgtagtgtttttcttagtccgttacgtaggtaggaatctgatgtaatggttgttggtattttgtcaccattcatttttatctggttgttctcaagttcggttacgagatccatttgtctatctagttcaacttggaaaatcaacgtatcagtcgggcggcctcgcttatcaaccaccaatttcatattgctgtaagtgtttaaatctttacttattggtttcaaaacccattggttaagccttttaaactcatggtagttattttcaagcattaacatgaacttaaattcatcaaggctaatctctatatttgccttgtgagttttcttttgtgttagttcttttaataaccactcataaatcctcatagagtatttgttttcaaaagacttaacatgttccagattatattttatgaatttttttaactggaaaagataaggcaatatctcttcactaaaaactaattctaatttttcgcttgagaacttggcatagtttgtccactggaaaatctcaaagcctttaaccaaaggattcctgatttccacagttctcgtcatcagctctctggttgctttagctaatacaccataagcattttccctactgatgttcatcatctgagcgtattggttataagtgaacgataccgtccgttctttccttgtagggttttcaatcgtggggttgagtagtgccacacagcataaaattagcttggtttcatgctccgttaagtcatagcgactaatcgctagttcatttgctttgaaaacaactaattcagacatacatctcaattggtctaggtgattttaatcactataccaattgagatgggctagtcaatgataattactagtccttttcctttgagttgtgggtatctgtaaattctgctagacctttgctggaaaacttgtaaattctgctagaccctctgtaaattccgctagacctttgtgtgttttttttgtttatattcaagtggttataatttatagaataaagaaagaataaaaaaagataaaaagaatagatcccagccctgtgtataactcactactttagtcagttccgcagtattacaaaaggatgtcgcaaacgctgtttgctcctctacaaaacagaccttaaaaccctaaaggcttaagtagcaccctcgcaagctcgggcaaatcgctgaatattccttttgtctccgaccatcaggcacctgagtcgctgtctttttcgtgacattcagttcgctgcgctcacggctctggcagtgaatgggggtaaatggcactacaggcgccttttatggattcatgcaaggaaactacccataatacaagaaaagcccgtcacgggcttctcagggcgttttatggcgggtctgctatgtggtgctatctgactttttgctgttcagcagttcctgccctctgattttccagtctgaccacttcggattatcccgtgacaggtcattcagactggctaatgcacccagtaaggcagcggtatcatcaacaggcttacccgtcttactgtcaagaggacatccggtcaaataaaacgaaaggctcagtcgaaagactgggcctttcgttttgctgaggagacttagggaccctttatgacaacttgacggctacatcattcactttttcttcacaaccggcacggaactcgctcgggctggccccggtgcattttttaaatacccgcgagaaatagagttgatcgtcaaaaccaacattgcgaccgacggtggcgataggcatccgggtggtgctcaaaagcagcttcgcctggctgatacgttggtcctcgcgccagcttaagacgctaatccctaactgctggcggaaaagatgtgacagacgcgacggcgacaagcaaacatgctgtgcgacgctggcgatatcaaaattgctgtctgccaggtgatcgctgatgtactgacaagcctcgcgtacccgattatccatcggtggatggagcgactcgttaatcgcttccatgcgccgcagtaacaattgctcaagcagatttatcgccagcagctccgaatagcgcccttccccttgcccggcgttaatgatttgcccaaacaggtcgctgaaatgcggctggtgcgcttcatccgggcgaaagaaccccgtattggcaaatattgacggccagttaagccattcatgccagtaggcgcgcggacgaaagtaaacccactggtgataccattcgcgagcctccggatgacgaccgtagtgatgaatctctcctggcgggaacagcaaaatatcacccggtcggcaaacaaattctcgtccctgatttttcaccaccccctgaccgcgaatggtgagattgagaatataacctttcattcccagcggtcggtcgataaaaaaatcgagataaccgttggcctcaatcggcgttaaacccgccaccagatgggcattaaacgagtatcccggcagcaggggatcattttgcgcttcagccatacttttcatactcccaccattcagagaagaaaccaattgtccatattgcatcagacattgccgtcactgcgtcttttactggctcttctcgctaacccaaccggtaaccccgcttattaaaagcattctgtaacaaagcgggaccaaagccatgacaaaaacgcgtaacaaaagtgtctataatcacggcagaaaagtccacattgattatttgcacggcgtcacactttgctatgccatagcatttttatccataagattagcggatcctacctgacgctttttatcgcaactctctactgtttctccatacccgttttacctgcaggtgcagtaaaatctgaaagggggatacacatcgtgatccaacaagaaagtcgtttaagagtcgctgacaattctggcgcacgtgaaattttaacgatcaaagtcctaggcggatctggtcgtaaaactgctaacatcggtgacgttattgttgctactgtcaaacaagcaacgccaggtggggttgttaaaaaaggtgaagtagttaaagccgttatcgttcgtacaaaatctggcgctcgtcgtgctgacggttcttacatcaaatttgatgaaaatgctgcggtaattatccgtgacgataaaagcccacgcggaacacgtatcttcggaccagttgcacgtgaattacgtgaaaacaacttcatgaagatcgtttctctagcaccagaagtattataatctcgagcccacgttaaaggaggtgcgaaacagtaatgtttgttaaaaaaggcgataaagtaaaagttatcactggtaaagataaaaacaaagaaggcgttgtcttagcagcgtttcctaaacaagataaagttatcgttgaaggtgtcaacgtcgttaaaaaacaccaaaaaccaaaccaagcagccccacaaggtggaatccttgaagtggaagcgccaattcatgtttctaatgtaatggtgattgatccttcaaacggagaagctactaaagttgcgtttaaagaagtcgacggcaaaaaagtccgcgtttctaaaaaaacaggtgaagttttagataaataaaaattgcggaaggagggcttactgaatgaaccgcctgaaagaaaaatatattaaagaagtaacaccatcattggtggaaaaatttaattacagctcagttatgcaaacacctaaagttgataaaatcgttatcaacatgggtgtgggtgatgcagtatcaaatgctaaaaacttagacaaagctgttgaagaattagcattaatcactggtcaaaaaccacttatcacaaaagctaaaaaatctatcgctggattccgtttacgtgaaggaatgccaatcggtgcgaaagtaacgctacgcggcgaaagaatgtacgaatttttagataaattagtaacagtttctttacctcgtgtacgtgacttccacggtgtcagcaaaaaagctttcgatggtcgtggtaactatactttaggtattaaagaacaattaatcttcccagaagttgattatgatttagtagataaagtacgcggtatggacatcgtaattgttacaacagcgaacactgacgaagagtctcgcgaattgttggcacaattaggtatgccattccaaaaataatataaggaggcgaactacgtggctaaaaaatcaatgattgctaaaaacaaacgtcctgctaaacattcaacacaagcttatactcgttgtgaacgttgtggacgtccacattcagtttatcgtaaatttcatctttgccgtatttgcttccgcgaacttgcctataaaggtcaaattcccggcgtgaagaaagctagctggtaaacaagtaaactcgcataaaggaggtaaatagttcaatggtcatgacagatccaattgcagattttctaactcgcattcgtaatgcgaacatggttaaacatgaaactttagaagtacctgcttcaaaaatcaaacgtgatatcgcagaaatcctgaaacgtgaaggatttatccgcgacgtagaatacatcgaagatgacaaacaaggcgtaatccgtgttttcctaaaatatggtaaaaacgaagaacgtgttatcacaaacttaaaacgtatttctaaaccaggtttacgtgcatacgtaaaagctgacgaagtaccaaaagtattaaacggtctaggaattgcaatcatctctacatcagagggtgtaattactgacaaagaagctagagcgaaaaatatcggcggcgaagtaatcgcctacgtatggtaattctaaaaaatacacaaggaggtgtctctaagtgagccgtattggtaataaagttgttgttcttcctgctggtgttgaaatcaagcaagacggaaacaacattacagttaaaggacctaaaggtgaattaacacgcgaattttcttctgatatcaaaatgaacatcgaaggaaacgaagtgacattcattcgtccaaacgattcaaaagaaatgaaaacaatccacggaacaactcgtgcaaacttcaacaacatggttgttggtgtttctgaaggtttccaaaaagcacttgaacttatcggggtcggataccgtgcccaagtacaaggcaacaaattaactttaaacgttggttattctcatcctgtcgaaatgacagcaccagaaggcgtaacatttgaagtacctgcgaacacacaagttatcgttaaaggcatcaacaaagaagttgttggtgaattagctgctaacatccgtggcgttcgtcctccagaaccttataaaggcaaagggattcgctatgttggtgaatttgtacgccgtaaagaaggtaaaactggtaaataataacagctgtgtagaaaacagaagtcaacaacaagcaactgtcattttatgggatttttccaataaaatgcttttgtcttgtctgccagcttctcttttccgtaatctgctgactgcttgaaatattagtagtaaacattaaatcaaagaggtgaaaattgtgattacaaaaccagataaaaacaaaacacgtcaaaagagacatcgtcgtgtacgtaacaaaatctctggtactgctgagtgcccacgcttgaacattttccgttctaacaaaaacatctacgcgcaagtcattgatgacgtagcgggtgtgacgctagcaagtgcctctgccttggataaagaaatttcaggtggaacaaaaacagaaacagctgcagctgttggtaaactagttgctgaacgtgccgctgaaaaaggcatcaaaaaagtagtcttcgaccgtggtggatacctttaccatggccgcgtgcaagctttagctgaagctgctcgtgaaaatggactagaattttaggagaaggaggaacaccattcatggtttatattgatccaaaacatttggaattagaagaccgcgttgtagcgatcaaccgtgtaacaaaagttgttaaaggtggacgtcgtttacgtttcgcagctttagttgttgtcggtgacaaaaacggacacgttggtttcggtactggtaaagcacaagaagtacctgaagctatccgtaaagcaatcgaagacgcgaagaaaaacttagttgaagtgcctatggttggttctactatcccgcacgaagtaattggcgtattcggtggcggccgtatccttatgaaacctgcagtagaaggttctggggtagctgctggtggaccagttcgtgccgtattggaattagctggtgtagcagatattacatctaaatcactaggttcaaacacacctattaacgttgttcgcgcaactgttgaaggtctaaaacaattaaaacgtgccgaagaagtggcagcacttcgcggtaaatctgtagaagaaattatcggttaaggaggacaaaaataatggctgaattaaaaattactttaaaacgcagtgttatcggacgtcctcaaaaccaacgtgctacagttaaagcgttaggtttaggtaaagtgaatagtactgttacaaaacctgccaatgaagcaatcaaaggtatggttaacactatttcacatttagtggacgtagaagaagtttaagatttatagatttgtaatagaagattgcttaaggaggtgccaaacctatgaaacttcatgaattaaaacctgctgagggctcacgccaagtacgtaaccgtgttggacgtggtacttcatctggtaatggtaaaacagctggccgtggacaaaaagggcaaaaagcccgttcaggcggtggtgttcgtttaggatttgaagggggtcaaactccattattccgtcgtttaccaaaacgtgggtttacaaacattaatcgtaaagattacgctgttgtaaacttagatactttaaaccgttttgaagatggaacagaagtaactcctgttgtcctaaaagaagcaggaatcgttaaaaacgaaaaagcgggaatcaaagttcttgcagatggtgagttaacgaaaaaattaactgtgaaagcagctaaattctcgaaatcagcacaagaagctatcgaagctgctggtggttcaatcgaggtgatctaattgttcaagctattaaagaacgcctacttaattaacggcactcctcagccaagtcaaaagcctccggtcggaggcttttgactacatgcccatggcgtttacgccccgccctgccactcatcgcagtactgttgtaattcattaagcattctgccgacatggaagccatcacaaacggcatgatgaacctgaatcgccagcggcatcagcaccttgtcgccttgcgtataatatttgcccatagtgaaaacgggggcgaagaagttgtccatattggccacgtttaaatcaaaactggtgaaactcacccagggattggctgagacgaaaaacatattctcaataaaccctttagggaaataggccaggttttcaccgtaacacgccacatcttgcgaatatatgtgtagaaactgccggaaatcgtcgtggtattcactccagagcgatgaaaacgtttcagtttgctcatggaaaacggtgtaacaagggtgaacactatcccatatcaccagctcaccgtctttcattgccatacggaactccggatgagcattcatcaggcgggcaagaatgtgaataaaggccggataaaacttgtgcttatttttctttacggtctttaaaaaggccgtaatatccagctgaacggtctggttataggtacattgagcaactgactgaaatgcctcaaaatgttctttacgatgccattgggatatatcaacggtggtatatccagtgatttttttctccattttagcttccttagctcctgaaaatctcgataactcaaaaaatacgcccggtagtgatcttatttcattatggtgaaagttggaacctcttacgtgccaagccaaataggccgt

SEQ ID NO: 341 - DNA, 8980 bp, Artificial
  Synthetic
tcagatccttccgtatttagccagtatgttctctagtgtggttcgttgtttttgcgtgagccatgagaacgaaccattgagatcatgcttactttgcatgtcactcaaaaattttgcctcaaaactggtgagctgaatttttgcagttaaagcatcgtgtagtgtttttcttagtccgttacgtaggtaggaatctgatgtaatggttgttggtattttgtcaccattcatttttatctggttgttctcaagttcggttacgagatccatttgtctatctagttcaacttggaaaatcaacgtatcagtcgggcggcctcgcttatcaaccaccaatttcatattgctgtaagtgtttaaatctttacttattggtttcaaaacccattggttaagccttttaaactcatggtagttattttcaagcattaacatgaacttaaattcatcaaggctaatctctatatttgccttgtgagttttcttttgtgttagttcttttaataaccactcataaatcctcatagagtatttgttttcaaaagacttaacatgttccagattatattttatgaatttttttaactggaaaagataaggcaatatctcttcactaaaaactaattctaatttttcgcttgagaacttggcatagtttgtccactggaaaatctcaaagcctttaaccaaaggattcctgatttccacagttctcgtcatcagctctctggttgctttagctaatacaccataagcattttccctactgatgttcatcatctgagcgtattggttataagtgaacgataccgtccgttctttccttgtagggttttcaatcgtggggttgagtagtgccacacagcataaaattagcttggtttcatgctccgttaagtcatagcgactaatcgctagttcatttgctttgaaaacaactaattcagacatacatctcaattggtctaggtgattttaatcactataccaattgagatgggctagtcaatgataattactagtccttttcctttgagttgtgggtatctgtaaattctgctagacctttgctggaaaacttgtaaattctgctagaccctctgtaaattccgctagacctttgtgtgttttttttgtttatattcaagtggttataatttatagaataaagaaagaataaaaaaagataaaaagaatagatcccagccctgtgtataactcactactttagtcagttccgcagtattacaaaaggatgtcgcaaacgctgtttgctcctctacaaaacagaccttaaaaccctaaaggcttaagtagcaccctcgcaagctcgggcaaatcgctgaatattccttttgtctccgaccatcaggcacctgagtcgctgtctttttcgtgacattcagttcgctgcgctcacggctctggcagtgaatgggggtaaatggcactacaggcgccttttatggattcatgcaaggaaactacccataatacaagaaaagcccgtcacgggcttctcagggcgttttatggcgggtctgctatgtggtgctatctgactttttgctgttcagcagttcctgccctctgattttccagtctgaccacttcggattatcccgtgacaggtcattcagactggctaatgcacccagtaaggcagcggtatcatcaacaggcttacccgtcttactgtcaagaggacatccggtcaaataaaacgaaaggctcagtcgaaagactgggcctttcgttttgctgaggagacttagggaccctttatgacaacttgacggctacatcattcactttttcttcacaaccggcacggaactcgctcgggctggccccggtgcattttttaaatacccgcgagaaatagagttgatcgtcaaaaccaacattgcgaccgacggtggcgataggcatccgggtggtgctcaaaagcagcttcgcctggctgatacgttggtcctcgcgccagcttaagacgctaatccctaactgctggcggaaaagatgtgacagacgcgacggcgacaagcaaacatgctgtgcgacgctggcgatatcaaaattgctgtctgccaggtgatcgctgatgtactgacaagcctcgcgtacccgattatccatcggtggatggagcgactcgttaatcgcttccatgcgccgcagtaacaattgctcaagcagatttatcgccagcagctccgaatagcgcccttccccttgcccggcgttaatgatttgcccaaacaggtcgctgaaatgcggctggtgcgcttcatccgggcgaaagaaccccgtattggcaaatattgacggccagttaagccattcatgccagtaggcgcgcggacgaaagtaaacccactggtgataccattcgcgagcctccggatgacgaccgtagtgatgaatctctcctggcgggaacagcaaaatatcacccggtcggcaaacaaattctcgtccctgatttttcaccaccccctgaccgcgaatggtgagattgagaatataacctttcattcccagcggtcggtcgataaaaaaatcgagataaccgttggcctcaatcggcgttaaacccgccaccagatgggcattaaacgagtatcccggcagcaggggatcattttgcgcttcagccatacttttcatactcccaccattcagagaagaaaccaattgtccatattgcatcagacattgccgtcactgcgtcttttactggctcttctcgctaacccaaccggtaaccccgcttattaaaagcattctgtaacaaagcgggaccaaagccatgacaaaaacgcgtaacaaaagtgtctataatcacggcagaaaagtccacattgattatttgcacggcgtcacactttgctatgccatagcatttttatccataagattagcggatcctacctgacgctttttatcgcaactctctactgtttctccatacccgttttacctgcaggtgcagttaaaataggcgaaggagggaacaagatggcaaaacaaaaaattcgtatccgtttaaaagcgtatgaacaccgtattttagatcaatcagcggataaaattgtggaaacagcaaaaagaactggagctgacgtatcaggtccgattccattaccaacagaacgctcactttacacagttattcgtgcgactcataaatacaaagattctcgcgaacaattcgaaatgcgtactcacaaacgtctaattgacattgtgaacccaacaccaaaaacagttgacgctctaatgaagcttgacttaccgtctggtgttaatattgaaatcaaactataaaattaagatggaggtgtactcatgaccaaaggaatcttagggaaaaaagtgggaatgacacaaatctttactgagtctggtgaattaattccagtaacagtagttgaagctacgccaaacgtagttttacaagtaaaaactgttgaaactgacggatacgaagctatccaagttggttaccaagacaaacgtgaagttttatcaaacaaacctgcgaaaggtcatgttgcaaaagcaaacacggctcctaagcgcttcattaaagaattcaagaatgttgagctaggagaatatgaagtaggtaaagaaatcaaagtagatgttttccaagcaggagacgttgttgatgttacaggtactacgaaaggtaaaggattccaaggggcaatcaaacgtcacggccaaagccgcggacctatgtctcatggttctcgttatcaccgtcgtcctgggtcaatgggtccagtagcgcctaaccgtgtatttaaaaataaacgactagccggccgtatgggtggcgaccgcgtaacaattcaaaaccttgaagttgttaaagtggacgtagaaagaaatgttatcttaatcaaaggaaacattcctggagcgaaaaaatctttaatcacaatcaaatcagctgtgaaagctaaataagtgtagggaaaggaggaactaaggaatgccgaatgtagcattattcaaacaagatggaactcaaaacggtgaaatcactttaaatgaagaaatcttcggaatcgaacctaatgaaagtgttgtctatgatgcaatcatcatgcaacgtgcttcattaagacaaggaacacacgcagttaaaaaccgtagcgctgttcgtggcggtggccgcaaaccatggcgtcaaaaaggaactggtcgtgctcgtcaaggttcaatccgttcaccacaatggcgtggaggtggcgtagtctttggaccaacaccgcgttcatacagctacaaatttcctaaaaaagttcgtcgcttagcaatgaaatctgtattatcagacaaagttgctgaaaataacttggtagcagtagaaggtttaagcttcgatgcaccaaaaacaaaagaattcaaacaagttcttgctaacttgtctatcgatactaaagtattagttgttttagaaaatggtaacgactttgcagctttatcagctcgtaacttaccaaacgtttctgtagtaacttctgataacgttagtgtgttagatgttgtgtcagctaacaaagtcttggcaacacaaacagctcttactcaaattgaggaggtgcttgcataatggaattactagacgtaatcaaacgcccagtgatcactgaaaaatccatgttagctatggacgaaaagaaatatactttcgaagtggacactcgcgcaaacaaaactttagtaaaacaagctgttgaatcagcattcgatgttaaagtagcaaacgtaaacatcttaaacgtgcgtccaaaattcaaacgcatgggtaaatatgcaggttatacaaaaaaacgtcgcaaagcgatcgttacattaactgaagattcaaaagaaattcaattattcgaagctgctgaataagcagtcctgaacaatatcaacgtaggagggaaataagacgtggcgattaaaaagtacaaacctaccacaaatggccgtcgtaacatgacgagttctgatttcgctgaaatcacaacttcaacaccagaaaaatcattgttacagccattaaaaaacaatgccggtcgtaacaacaacggtcgcattacggttcgtcaccaaggtggcggtcacaaacgtcaataccgtgtgattgacttcaaacgtaataaagataacgtcgcagcggttgttaaaacgatcgagtacgatccaaaccgttctgctaacatcgcgttagttcattacgaagacggggttaaggcatacatcttagcaccaaaaggattagaagtaggcatgcgcctagtatctggtccagaagcagatattaaagtaggtaacgcattaccattggaaaacattccagttggtacagttatccacaacattgaaatgaaacctggtaaaggtggacaattaatccgttcagctggaacaagcgcgcaagtacttggtaaagaaggcaaatacgtattaatccgcttaaactctggcgaagttcgtatgatcttagcaacttgccgtgcaacaatcggttcagttggtaacgaacaacacgaattaatcaacattggtaaagctggccgctctcgttggatgcgtaaacgcccaactgttcgtggtagcgtaatgaaccctaacgatcacccacacggtggtggtgaaggtaaaacaccaattggacgtaaagcgccagtatctccatggggtcaaccagcaattggatacaaaacacgtaataaaaaagctaaatcagacaaacttatcgttcgtcgtcgtactaaataatttttttgaccatgtgtcgtacattttgagaggaggttcaccatgggtcgtagtttaaaaaaaggacctttcgtcgatgatcatttgatgaaaaaggtcgaagcacaacaaggtgccgaaaagaaaaaagtaattaaaacttggtctcgccgctctacaatttttccatcattcgtaggtttcacaatcgctgtatatgatggacggaaacatgtccctgtttacattcaagaagacatggtaggacataaattaggtgaatttgcaccaactagaacttatcgtggccacgttgctgacgataaaaaaactaaacgctaattttgaggggaggatatgcaaatgtcagaacaaattacatcagctaaagcaactgcaaaaacagttcgcacttcacctcgtaaagcacgtttagtaatcgatcttatcagagggaaaagcgttgcggatgcaatttcaatcttgaaattcacaccgaacaagtctgctggaatcattgaaaaagttttaatgtcagcagttgctaacgcagaaaacaactttgacttagacgttgaaagcttagtcgtatctgaagcatttgttaacgaaggaccaacaatgaaacgtttccgtcctcgtgcaaaaggttcagcttcaccaatcaacaaacgtactagtcacatcacagtagttgtaacagagaaataagtctcatgaaataggctgttttctttatgaaaacagagcttaaacatttaagaggagggacaatcagtgggtcaaaaagtacatccaattggaatgcgtgtaggcatcatccgcgactgggatgcgaaatggtatgctgaaaaagagtatgccgaattcttacacgaagatttaagaatccgtaaatttatcgcaacaaaacttgctgatgctgctgtatctacaattgaaatcgaacgcgctgcaaaccgtgttaacatttcaattcacacagctaaaccaggtatggttatcggtaaaggcggatctgaagtcgaaaacctaagaaaagaattaaacaaattaactggcaaacgagttcacatcaacatcgttgaaatcaaaaaaccagatttagatgcaaaattagtaggcgaaggaattgcacgtcaattagaaaaccgtgttgctttccgtcgtgctcaaaaacaagccatccaacgcgcaatgcgtgctggcgctaaaggaatcaaaactcaagtatcaggtcgtctaaacggtgcggatatcgctcgttcagaaggatactctgaaggaactgtaccacttcacacattacgtgcggacattgattacgcatgggaagaagcggacactacttacggaaaactaggagttaaagtgtggatctatcgtggagaaattcttccaacgaaaaaaaacactgagaaaggagggaaataatcatgttagtacctaaacgtgtaaaacaccgtcgtgaattccgcggaaaaatgcgcggtgaagctaaaggcggaaaagaagtagcatttggtgaatggggtttacaagcaactgaatctcactggattactaaccgtcaaatcgaagcagcccgtattgcaatgactcgttacatgaaacgtggcgggaaagtatggattaaaattttccctcacaagtcttacacaagtaaagctatcggcgtacgtatgggtaaaggtaaaggggcaccagaaggctgggtatcaccagttaaacgtggtaaaatcatgtttgaaatcgcaggcgttcctgaagaagtagctcgtgaagctcttcgtcttgcatctcacaaattgccggtaaaaactaagatcgtaaaacgtgaggaaatgggtggtgaatcgaatgaaggttaaagaaatcagagaattaaccactgccgaaatgctagataaagaaaaacaattaaaagaagaattgttcaacttaagattccaattagcaacaggtcaattagaaaacactgcacgtattaaagaagtacgtcaatcgattgcacgcatcaaaacagtattgcgtgaacaagctaactaatagtggaaggaggccaaacgcgtatgactgaagaaagaaatcaacgtaaagtttaccaaggtcgcgtggtatcagacaaaatggataaaacaatcacagttgtcgttgaaacaaagaaaaaccaccctatctatggcaaacgtatgaaatattctaaaaaatataaagcgcatgatgaaaacaacacagcgaaagttggagacatcgtaaaaatcatggaaactcgtccattatcagctacaaaacgtttccgtttactagaggtagtcgaagaagcagttattatctaataaaacgagaatttcctaatagattacttaattaacggcactcctcagccaagtcaaaagcctccggtcggaggcttttgactacatgcccatggcgtttacgccccgccctgccactcatcgcagtactgttgtaattcattaagcattctgccgacatggaagccatcacaaacggcatgatgaacctgaatcgccagcggcatcagcaccttgtcgccttgcgtataatatttgcccatagtgaaaacgggggcgaagaagttgtccatattggccacgtttaaatcaaaactggtgaaactcacccagggattggctgagacgaaaaacatattctcaataaaccctttagggaaataggccaggttttcaccgtaacacgccacatcttgcgaatatatgtgtagaaactgccggaaatcgtcgtggtattcactccagagcgatgaaaacgtttcagtttgctcatggaaaacggtgtaacaagggtgaacactatcccatatcaccagctcaccgtctttcattgccatacggaactccggatgagcattcatcaggcgggcaagaatgtgaataaaggccggataaaacttgtgcttatttttctttacggtctttaaaaaggccgtaatatccagctgaacggtctggttataggtacattgagcaactgactgaaatgcctcaaaatgttctttacgatgccattgggatatatcaacggtggtatatccagtgatttttttctccattttagcttccttagctcctgaaaatctcgataactcaaaaaatacgcccggtagtgatcttatttcattatggtgaaagttggaacctcttacgtgccaagccaaataggccgt

SEQ ID NO: 342 - DNA, 7394 bp, Artificial
  Synthetic
agacttagggaccctgcggccgccattaattcctaatttttgttgacactctatcattgatagagttattttaccactccctatcagtgatagagaaaagtgaaatgaatagaccggccgctgagaaaaagcgaagcggcactgctctttaacaatttatcagacaatctgtgtgggcactcgaagatacggattcttaacgtcgcaagacgaaaaatgaataccaagtctcaagagtgaacacgtaattcattacgaagtttaattctttgagcgtcaaacttttaaattgaagagtttgatcatggctcagattgaacgctggcggcaggcctaacacatgcaagtcgaacggtaacaggaatcagcttgctgattcgctgacgagtggcggacgggtgagtaatgtctgggaaactgcctgatggagggggataactactggaaacggtagctaataccgcataatgtcgcaagaccaaaaagggggaccttcgggcctcttgccatcagatgtgcccagatgggattagcttgttggtggggtaacggctcaccaaggcgacgatccctagctggtctgagaggatgaccagccacactggaactgagacacggtccagactcctacgggaggcagcagtggggaatattgcacaatgggcgcaagcctgatgcagccatgccgcgtgtatgaagaaggccttcgggttgtaaagtactttcagcggggaggaagggagtaaagttaatacctttgctcattgacgttatccgcagaagaagcaccggctaactccgtgccagcagccgcggtaatacggagggtgcaagcgttaatcggaattactgggcgtaaagcgcacgcaggcggtttgttaagtcagatgtgaaatccccgggctcaacctgggaactgcatctgatactggcaagcttgagtctcgtagaggggggtagaattccaggtgtagcggtgaaatgcgtagagatctggaggaataccggtggcgaaggcggccccctggacgaagactgacgctcaggtgcgaaagcgtggggagcaaacaggattagataccctggtagtccacgccgtaaacgatgtcgacttggaggttgtgcccttgaggcgtggcttccggagctaacgcgttaagtcgaccgcctggggagtacggccgcaaggttaaaactcaaatgaattgacgggggcccgcacaagcggtggagcatgtggtttaattcgatgcaacgcgaagaaccttacctggtcttgacatccacggaagttttcagagatgagaatgtgccttcgggaaccgtgagacaggtgctgcatggctgtcgtcagctcgtgttgtgaaatgttgggttaagtcccgcaacgagcgcaacccttatcctttgttgccagcggtccggccgggaactcaaaggagactgccagtgataaactggaggaaggtggggacgacgtcaagtcatcatggcccttacgaccagggctacacacgtgctacaatggcgcatacaaagagaagcgacctcgcgagagcaagcggacctcataaagtgcgtcgtagtccggattggagtctgcaactcgactccatgaagtcggaatcgctagtaatcgtggatcagaatgccacggtgaatacgttcccgggccttgtacacaccgcccgtcacaccatgggagtgggttgcaaaagaagtaggtagcttaaccggtcaacagccgtttgagctaaccggtactaatgaaccgtgaggcttaaccttgagaggttaagcgactaagcgtacacggtggatgccctggcagtcagaggcgatgaaggacgtgctaatctgcgataagcgtcggtaaggtgatatgaaccattataaccggcgatttccgaatggggaaacccagtgtgattcgtcacactatcattaactgaatccataggttaatgaggcgaaccgggggaactgaaacatctaagtaccccgaggaaaagaaatcaaccgagattcccccagtagcggcgagcgaacggggagcagcccagagcctgaatcagtgtgtgtgttagtggaagcgtctggaaaggcgtgcgatacagggtgacagccccgtacacaaaaatgcacatattgtgagctcgatgagtagggcgggacacgtggtatcctgtctgaatatggggggaccatcctccaaggctaaatactcctgactgaccgatagtgaaccagtaccgtgagggaaaggcgaaaagaaccccggcgaggggagtgaaaaagaacctgaaaccgtgtacgtacaagcagtgggagcacgcttaggcgtgtgactgcgtaccttttgtataatgggtcagcgacttatattctgtagcaaggttaaccgaataggggagccgaagggaaaccgagtcttaactgggcgttaagttgcagggtatagacccgaaacccggtgatctagccatgggcaggttgaaggttgggtaacactaactggaggaccgaaccgactaatgttgaaaaattagcggatgacttgtggctgggggtgaaaggccaatcaaaccgggagatagctggttctccccgaaagctatttaggtagcgcctcgtgaattcatctccgggggtagagcactgtttcggcaagggggtcatcccgacttaccaacccgatgcaaactgcgaataccggagaatgttatcacgggagacacacggcgggtgctaacgtccgtcgtgaagagggaaacaacccagaccgccagctaaggtcccaaagtcatggttaagtgggaaacgatgtgggaaggcccagacagccaggatgttggcttagaagcagccatcatttaaagaaagcgtaatagctcactggtcgagtcggcctgcgcggaagatgtaacggggctaaaccatgcaccgaagctgcggcagcgacgctgatgcgttgttgggtaggggagcgttctgtaagcctgtgaaggtgtgctgtgaggtatgctggaggtatcagaagtgcgaatgctgacataagtaacgataaagcgggtgaaaagcccgctcgccggaagaccaagggttcctgtccaacgttaatcggggcagggtgagtcgacccctaaggcgaggccgaaaggcgtagtcgatgggaaacaggttaatattcctgtacttggtgttactgcgaaggggggacggagaaggctatgttggccgggcgacggttgtcccggtttaagcgtgtaggctggttttccaggcaaatccggaaaactaaggctgaggcgtgatgacgaggcactacggtgctgaagcaacaaatgccctgcttccaggaaaagcctctaagcatcaggtaacatcaaatcgtaccccaaaccgacacaggtggtcaggtagagaataccaaggcgcttgagagaactcgggtgaaggaactaggcaaaatggtgccgtaacttcgggagaaggcacgctgatatgtaggtgaagtccctcgcggatggagctgaaatcagtcgaagataccagctggctgcaactgtttattaaaaacacagcactgtgcaaacacgaaagtggacgtatacggtgtgacgcctgcccggtgccggaaggttaattgatggggtcagcgcaagcgaagctcttgatcgaagccccggtaaacggcggccgtaactataacggtcctaaggtagcgaaattccttgtcgggtaagttccgacctgcacgaatggcgtaatgatggccaggctgtctccacccgagactcagtgaaattgaactcgctgtgaagatgcagtgtacccgcggcaagacggaaagaccccgtgaacctttactatagcttgacactgaacattgagccttgatgtgtaggataggtgggaggctttgaagtgtggacgccagtctgcatggagccgaccttgaaataccaccctttaatgtttgatgttctaacgttgacccgtaatccgggttgcggacagtgtctggtgggtagtttgactggggcggtctcctcctaaagagtaacggaggagcacgaaggttggctaatcctggtcggacatcaggaggttagtgcaatggcataagccagcttgactgcgagcgtgacggcgcgagcaggtgcgaaagcaggtcatagtgatccggtggttctgaatggaagggccatcgctcaacggataaaaggtactccggggataacaggctgataccgcccaagagttcatatcgacggcggtgtttggcacctcgatgtcggctcatcacatcctggggctgaagtaggtcccaagggtatggctgttcgccatttaaagtggtacgcgagctgggtttagaacgtcgtgagacagttcggtccctatctgccgtgggcgctggagaactgaggggggctgctcctagtacgagaggaccggagtggacgcatcactggtgttcgggttgtcatgccaatggcactgcccggtagctaaatgcggaagagataagtgctgaaagcatctaagcacgaaacttgccccgagatgagttctccctgactccttgagagtcctgaaggaacgttgaagacgacgacgttgataggccgggtgtgtaaacggacatggttttcgggagggcgcttaccactttgtgattcatgactggggtgaagtcgtaacaaggtaaccgtaggggaacctgcggttggatcatgtggttaccttaaagaagcgtactttgtagtgctcacacagattgtctgatagaaagtgaaaagcaaggcgtttacgcgttgggagtgaggctgaagagaataaggccgttcgctttctattaatgaaagctcaccctacacgaaaatatcacgcaacgcgtgataagcaattttcgtgtccccttcgtctagaggcccaggacaccgccctttcacggcggtaacaggggttcgaatcccctaggggacgccacttgctggtttgtgagtgaaagtcgccgaccttaatatctcaaaactcatcttcgggtgatgtttgagatatttgctctttaaaaatctggatcaagctgaaaattgaaacactgaacaacgagagttgttcgtgagtctctcaaattttcgcaacacgatgatgaatcgaaaggcggatgagagaagattttcagcctgatacagattaaatcagaacgcagaagcggtctgataaaacagaattgcctggcggccgtagcgcggtggtcccacctgaccccatgccgaactcagaagtgaaacgccgtagcgccgatggtagtgtggggtctccccatgcgagagtagggaactgccaggcatcaaataaaacgaaaggctcagtcgaaagactgggcctttcgttttatctgttgtttgtcggtgaacgctctcctgagtaggacaaatccgccgggagcggatttgaacgttgcgaagcaacggcccggagggtggcgggcaggacgcccgccataaactgccaggcatcaaattaagcagaaggccatcctgacggatggcctttttgcgtttctacaaactcttcctgtcgtcatatctacaagccggcgcgccgggaaatgtgcgcggaacccctatttgtttatttttctaaatacattcaaatatgtatccgctcatgagacaataaccctgataaatgcttcaataatattgaaaaaggaagagtatgagtattcaacatttccgtgtcgcccttattcccttttttgcggcattttgccttcctgtttttgctcacccagaaacgctggtgaaagtaaaagatgctgaagatcagttgggtgcacgagtgggttacatcgaactggatctcaacagcggtaagatccttgagagttttcgccccgaagaacgttttccaatgatgagcacttttaaagttctgctatgtggcgcggtattatcccgtgttgacgccgggcaagagcaactcggtcgccgcatacactattctcagaatgacttggttgagtactcaccagtcacagaaaagcatcttacggatggcatgacagtaagagaattatgcagtgctgcaataaccatgagtgataacactgcggccaacttacttctgacaacgatcggaggaccgaaggagctaaccgcttttttgcacaacatgggggatcatgtaactcgccttgatcgttgggaaccggagctgaatgaagccataccaaacgacgagcgtgacaccacgatgcctgcagcaatggcaacaacgttgcgcaaactattaactggcgaactacttactctagcttcccggcaacaattaatagactggatggaggcggataaagttgcaggaccacttctgcgctcggcccttccggctagctggtttattgctgataaatctggagccggtgagcgtgggtctcgcggtatcattgcagcactggggccagatggtaagccctcccgtatcgtagttatctacacgacggggagtcaggcaactatggatgaacgaaatagacagatcgctgagataggtgcctcactgattaagcattggtaactgcagaccaagtttactcatatatactttagattgatttaaaacttcatttttaatttaaaaggatctaggtgaagatcctttttgataatctcatgaccaaaatcccttaacgtgagttttcgttccactgagcgtcagaccccgtagaaaagatcaaaggatcttcttgagatcctttttttctgcgcgtaatctgctgcttgcaaacaaaaaaaccaccgctaccagcggtggtttgtttgccggatcaagagctaccaactctttttccgaaggtaactggcttcagcagagcgcagataccaaatactgtccttctagtgtagccgtagttaggccaccacttcaagaactctgtagcaccgcctacatacctcgctctgctaatcctgttaccagtggctgctgccagtggcgataagtcgtgtcttaccgggttggactcaagacgatagttaccggataaggcgcagcggtcgggctgaacggggggttcgtgcacacagcccagcttggagcgaacgacctacaccgaactgagatacctacagcgtgagctatgagaaagcgccacgcttcccgaagggagaaaggcggacaggtatccggtaagcggcagggtcggaacaggagagcgcacgagggagcttccagggggaaacgcctggtatctttatagtcctgtcgggtttcgccacctctgacttgagcgtcgatttttgtgatgctcgtcaggggggcggagcctatggaaaaacgccagcaacgcggcctttttacggttcctggccttttgctgg

SEQ ID NO: 343 - DNA, 7394 bp, Artificial
  Synthetic
agacttagggaccctgcggccgccattaattcctaatttttgttgacactctatcattgatagagttattttaccactccctatcagtgatagagaaaagtgaaatgaatagaccggccgctgagaaaaagcgaagcggcactgctctttaacaatttatcagacaatctgtgtgggcactcgaagatacggattcttaacgtcgcaagacgaaaaatgaataccaagtctcaagagtgaacacgtaattcattacgaagtttaattctttgagcgtcaaacttttaaattgaagagtttgatcatggctcagattgaacgctggcggcaggcctaacacatgcaagtcgaacggtaacaggaaacagcttgctgtttcgctgacgagtggcggacgggtgagtaatgtctgggaaactgcctgatggagggggataactactggaaacggtagctaataccgcataacgtcgcaagaccaaagagggggaccttcgggcctcttgccatcggatgtgcccagatgggattagctagtaggtggggtaacggctcacctaggcgacgatccctagctggtctgagaggatgaccagccacactggaactgagacacggtccagactcctacgggaggcagcagtggggaatattgcacaatgggcgcaagcctgatgcagccatgccgcgtgtatgaagaaggccttcgggttgtaaagtactttcagcggggaggaagggagtaaagttaatacctttgctcattgacgttacccgcagaagaagcaccggctaactccgtgccagcagccgcggtaatacggagggtgcaagcgttaatcggaattactgggcgtaaagcgcacgcaggcggtttgttaagtcagatgtgaaatccccgggctcaacctgggaactgcatctgatactggcaagcttgagtctcgtagaggggggtagaattccaggtgtagcggtgaaatgcgtagagatctggaggaatatcggtggcgaaggcggccccctggacgaagactgacgctcaggtgcgaaagcgtggggagcaaacaggattagataccctggtagtccacgccgtaaacgatgtcgacttggaggttgtgcccttgaggcgtggcttccggagctaacgcgttaagtcgaccgcctggggagtacggccgcaaggttaaaactcaaatgaattgacgggggcccgcacaagcggtggagcatgtggtttaattcgatgcaacgcgaagaaccttacctggtcttgacatccacggaagttttcagagatgagaatgtgccttcgggaaccgtgagacaggtgctgcatggctgtcgtcagctcgtgttgtgaaatgttgggttaagtcccgcaacgagcgcaacccttatcctttgttgccagcggtccggccgggaactcaaaggagactgccagtgataaactggaggaaggtggggatgacgtcaagtcatcatggcccttacgaccagggctacacacgtgctacaatggcgcatacaaagagaagcgacctcgcgagagcaagcggacctcataaagtgcgtcgtagtccggattggagtctgcaactcgactccatgaagtcggaatcgctagtaatcgtggatcagaatgccacggtgaatacgttcccgggccttgtacacaccgcccgtcacaccatgggagtgggttgcaaaagaagtaggtagcttaaccggtcaacagccgtttgagctaaccggtactaatgaaccgtgaggcttaaccttgagaggttaagcgactaagcgtacacggtggatgccctggcagtcagaggcgatgaaggacgtgctaatctgcgataagcgtcggtaaggtgatatgaaccgttataaccggcgatttccgaatggggaaacccagtgtgtttcgacacactatcattaactgaatccataggttaatgaggcgaaccgggggaactgaaacatctaagtaccccgaggaaaagaaatcaaccgagattcccccagtagcggcgagcgaacggggaggagcccagagcctgaatcagtgtgtgtgttagtggaagcgtctggaaaggcgcgcgatacagggtgacagccccgtacacaaaaatacacatattgtgagctcgatgagtagggcgggacacgtggtatcctgtctgaatatggggggaccatcctccaaggctaaatactcctgactgaccgatagtgaaccagtaccgtgagggaaaggcgaaaagaaccccggcgaggggagtgaaaaagaacctgaaaccgtgtacgtacaagcagtgggagcacgcttaggcgtgtgactgcgtaccttttgtataatgggtcagcgacttatattctgtagcaaggttaaccgaataggggagccgaagggaaaccgagtcttaactgggcgttaagttgcagggtatagacccgaaacccggtgatctagccatgggcaggttgaaggttgggtaacactaactggaggaccgaaccgactaatgttgaaaaattagcggatgacttgtggctgggggtgaaaggccaatcaaaccgggagatagctggttctccccgaaagctatttaggtagcgcctcgtgaattcatctccgggggtagagcactgtttcggcaagggggtcatcccgacttaccaacccgatgcaaactgcgaataccggagaatgttatcacgggagacacacggcgggtgctaacgtccgtcgtgaagagggaaacaacccagaccgccagctaaggtcccaaagtcatggttaagtgggaaacgatgtgggaaggcccagacagccaggatgttggcttagaagcagccatcatttaaagaaagcgtaatagctcactggtcgagtcggcctgcgcggaagatgtaacggggctaaaccatgcaccgaagctgcggcagcgacgcttatgcgttgttgggtaggggagcgttctgtaagcctgcgaaggtgtgctgtgaggcatgctggaggtatcagaagtgcgaatgctgacataagtaacgataaagcgggtgaaaagcccgctcgccggaagaccaagggttcctgtccaacgttaatcggggcagggtgagtcgacccctaagacgaggccgaaaggcgtagtcgatgggaaacaggttaatattcctgtacttggtgttactgcgaaggggggacggagaaggctatgttggccgggcgacggttgtcccggtttaagcgtgtaggctggttttccaggcaaatccggaaaatcaaggctgaggcgtgatgacgaggcactacggtgctgaagcaacaaatgccctgcttccaggaaaagcctctaagcatcaggtaacatcaaatcgtaccccaaaccgacacaggtggtcaggtagagaataccaaggcgcttgagagaactcgggtgaaggaactaggcaaaatggtgccgtaacttcgggagaaggcacgctgatatgtaggtgaagtcccttgcggatggagctgaaatcagtcgaagataccagctggctgcaactgtttattaaaaacacagcactgtgcaaacacgaaagtggacgtatacggtgtgacgcctgcccggtgccggaaggttaattgatggggtcagcgcaagcgaagctcttgatcgaagccccggtaaacggcggccgtaactataacggtcctaaggtagcgaaattccttgtcgggtaagttccgacctgcacgaatggcgtaatgatggccaggctgtctccacccgagactcagtgaaattgaactcgctgtgaagatgcagtgtacccgcggcaagacggaaagaccccgtgaacctttactatagcttgacactgaacattgagccttgatgtgtaggataggtgggaggctttgaagtgtggacgccagtctgcatggagccggccttgaaataccaccctttaatgtttgatgttctaacgtggacccgtgatccgggttgcggacagtgtctggtgggtagtttgactggggcggtctcctcctaaagagtaacggaggagcacgaaggttggctaatcctggtcggacatcaggaggttagtgcaatggcataagccagcttgactgcgagcgtgacggcgcgagcaggtgcgaaagcaggtcatagtgatccggtggttctgaatggaagggccatcgctcaacggataaaaggtactccggggataacaggctgataccgcccaagagttcatatcgacggcggtgtttggcacctcgatgtcggctcatcacatcctggggctgaagtaggtcccaagggtatggctgttcgccatttaaagtggtacgcgagctgggtttagaacgtcgtgagacagttcggtccctatctgccgtgggcgctggagaactgaggggggctgctcctagtacgagaggaccggagtggacgcatcactggtgttcgggttgtcatgccaatggcactgcccggtagctaaatgcggaagagataagtgctgaaagcatctaagcacgaaacttgccccgagatgagttctccctgaccctttaagggtcctgaaggaacgttgaagacgacgacgttgataggccgggtgtgtaaacggacatggttttcgggagggcgcttaccactttgtgattcatgactggggtgaagtcgtaacaaggtaaccgtaggggaacctgcggttggatcatgtggttaccttaaagaagcgtactttgtagtgctcacacagattgtctgatagaaagtgaaaagcaaggcgtttacgcgttgggagtgaggctgaagagaataaggccgttcgctttctattaatgaaagctcaccctacacgaaaatatcacgcaacgcgtgataagcaattttcgtgtccccttcgtctagaggcccaggacaccgccctttcacggcggtaacaggggttcgaatcccctaggggacgccacttgctggtttgtgagtgaaagtcgccgaccttaatatctcaaaactcatcttcgggtgatgtttgagatatttgctctttaaaaatctggatcaagctgaaaattgaaacactgaacaacgagagttgttcgtgagtctctcaaattttcgcaacacgatgatgaatcgaaaggcggatgagagaagattttcagcctgatacagattaaatcagaacgcagaagcggtctgataaaacagaattgcctggcggccgtagcgcggtggtcccacctgaccccatgccgaactcagaagtgaaacgccgtagcgccgatggtagtgtggggtctccccatgcgagagtagggaactgccaggcatcaaataaaacgaaaggctcagtcgaaagactgggcctttcgttttatctgttgtttgtcggtgaacgctctcctgagtaggacaaatccgccgggagcggatttgaacgttgcgaagcaacggcccggagggtggcgggcaggacgcccgccataaactgccaggcatcaaattaagcagaaggccatcctgacggatggcctttttgcgtttctacaaactcttcctgtcgtcatatctacaagccggcgcgccgggaaatgtgcgcggaacccctatttgtttatttttctaaatacattcaaatatgtatccgctcatgagacaataaccctgataaatgcttcaataatattgaaaaaggaagagtatgagtattcaacatttccgtgtcgcccttattcccttttttgcggcattttgccttcctgtttttgctcacccagaaacgctggtgaaagtaaaagatgctgaagatcagttgggtgcacgagtgggttacatcgaactggatctcaacagcggtaagatccttgagagttttcgccccgaagaacgttttccaatgatgagcacttttaaagttctgctatgtggcgcggtattatcccgtgttgacgccgggcaagagcaactcggtcgccgcatacactattctcagaatgacttggttgagtactcaccagtcacagaaaagcatcttacggatggcatgacagtaagagaattatgcagtgctgcaataaccatgagtgataacactgcggccaacttacttctgacaacgatcggaggaccgaaggagctaaccgcttttttgcacaacatgggggatcatgtaactcgccttgatcgttgggaaccggagctgaatgaagccataccaaacgacgagcgtgacaccacgatgcctgcagcaatggcaacaacgttgcgcaaactattaactggcgaactacttactctagcttcccggcaacaattaatagactggatggaggcggataaagttgcaggaccacttctgcgctcggcccttccggctagctggtttattgctgataaatctggagccggtgagcgtgggtctcgcggtatcattgcagcactggggccagatggtaagccctcccgtatcgtagttatctacacgacggggagtcaggcaactatggatgaacgaaatagacagatcgctgagataggtgcctcactgattaagcattggtaactgcagaccaagtttactcatatatactttagattgatttaaaacttcatttttaatttaaaaggatctaggtgaagatcctttttgataatctcatgaccaaaatcccttaacgtgagttttcgttccactgagcgtcagaccccgtagaaaagatcaaaggatcttcttgagatcctttttttctgcgcgtaatctgctgcttgcaaacaaaaaaaccaccgctaccagcggtggtttgtttgccggatcaagagctaccaactctttttccgaaggtaactggcttcagcagagcgcagataccaaatactgtccttctagtgtagccgtagttaggccaccacttcaagaactctgtagcaccgcctacatacctcgctctgctaatcctgttaccagtggctgctgccagtggcgataagtcgtgtcttaccgggttggactcaagacgatagttaccggataaggcgcagcggtcgggctgaacggggggttcgtgcacacagcccagcttggagcgaacgacctacaccgaactgagatacctacagcgtgagctatgagaaagcgccacgcttcccgaagggagaaaggcggacaggtatccggtaagcggcagggtcggaacaggagagcgcacgagggagcttccagggggaaacgcctggtatctttatagtcctgtcgggtttcgccacctctgacttgagcgtcgatttttgtgatgctcgtcaggggggcggagcctatggaaaaacgccagcaacgcggcctttttacggttcctggccttttgctgg

SEQ ID NO: 344 - DNA, 7394 bp, Artificial
  Synthetic
agacttagggaccctgcggccgccattaattcctaatttttgttgacactctatcattgatagagttattttaccactccctatcagtgatagagaaaagtgaaatgaatagaccggccgctgagaaaaagcgaagcggcactgctctttaacaatttatcagacaatctgtgtgggcactcgaagatacggattcttaacgtcgcaagacgaaaaatgaataccaagtctcaagagtgaacacgtaattcattacgaagtttaattctttgagcgtcaaacttttaaattgaagagtttgatcatggctcagattgaacgctggcggcaggcctaacacatgcaagtcgaacggtaacaggaagcagcttgctgtttcgctgacgagtggcggacgggtgagtaatgtctgggaaactgcctgatggagggggataactactggaaacggtagctaataccgcataacgtcgcaagaccaaagagggggaccttcgggcctcttgccatcggatgtgcccagatgggattagctagtaggtggggtaacggctcacctaggcgacgatccctagctggtctgagaggatgaccagccacactggaactgagacacggtccagactcctacgggaggcagcagtggggaatattgcacaatgggcgcaagcctgatgcagccatgccgcgtgtatgaagaaggccttcgggttgtaaagtactttcagcggggaggaagggagtaaagttaatacctttactcattgacgttacccgcagaagaagcaccggctaactccgtgccagcagccgcggtaatacggagggtgcaagcgttaatcggaattactgggcgtaaagcgcacgcaggcggtttgttaagtcagatgtgaaatccccgggctcaacctgggaactgcatctgatactggcaagcttgagtctcgtagaggggggtagaattccaggtgtagcggtgaaatgcgtagagatctggaggaataccggtggcgaaggcggccccctggacgaagactgacgctcaggtgcgaaagcgtggggagcaaacaggattagataccctggtagtccacgccgtaaacgatgtcgacttggaggttgtgcccttgaggtgtggcttccggagctaacgcgttaagtcgaccgcctggggagtacggccgcaaggttaaaactcaaatgaattgacgggggcccgcacaagcggtggagcatgtggtttaattcgatgcaacgcgaagaaccttacctggtcttgacatccacggaagttttcagagatgagaatgtgccttcgggaaccgtgagacaggtgctgcatggctgtcgtcagctcgtgttgtgaaatgttgggttaagtcccgcaacgagcgcaacccttatcctttgttgccagcggtccggccgggaactcaaaggagactgccagtgataaactggaggaaggtggggatgacgtcaagtcatcatggcccttacgaccagggctacacacgtgctacaatggcgcatacaaagagaagcgacctcgcgagagcaagcggacctcataaagtgcgtcgtagtccggattggagtctgcaactcgactccatgaagtcggaatcgctagtaatcgtggatcagaatgccacggtgaatacgttcccgggccttgtacacaccgcccgtcacaccatgggagtgggttgcaaaagaagtaggtagcttaaccggtcaacagccgtttgagctaaccggtactaatgaaccgtgaggcttaaccttgagaggttaagcgactaagcgtacacggtggatgccctggcagtcagaggcgatgaaggacgtgctaatctgcgataagcgtcggtaaggtgatatgaaccgttataaccggcgatttccgaatggggaaacccagtgtgattcgtcacactatcattaactgaatccataggttaatgaggcgaaccgggggaactgaaacatctaagtaccccgaggaaaagaaatcaaccgagattcccccagtagcggcgagcgaacggggagcagcccagagcctgaatcagtgtgtgtgttagtggaagcgtctggaaaggcgtgcgatacagggtgacagccccgtacacaaaaatgcacatactgtgagctcgatgagtagggcgggacacgtggtatcctgtctgaatatggggggaccatcctccaaggctaaatactcctgactgaccgatagtgaaccagtaccgtgagggaaaggcgaaaagaaccccggcgaggggagtgaaaaagaacctgaaaccgtgtacgtacaagcagtgggagcacgcttaggcgtgtgactgcgtaccttttgtataatgggtcagcgacttatattctgtagcaaggttaaccgaataggggagccgaagggaaaccgagtcttaactgggcgttaagttgcagggtatagacccgaaacccggtgatctagccatgggcaggttgaaggttgggtaacactaactggaggaccgaaccgactaatgttgaaaaattagcggatgacttgtggctgggggtgaaaggccaatcaaaccgggagatagctggttctccccgaaagctatttaggtagcgcctcgtgaattcatctccgggggtagagcactgtttcggcaagggggtcatcccgacttaccaacccgatgcaaactgcgaataccggagaatgttatcacgggagacacacggcgggtgctaacgtccgtcgtgaagagggaaacaacccagaccgccagctaaggtcccaaagtcatggttaagtgggaaacgatgtgggaaggcccagacagccaggatgttggcttagaagcagccatcatttaaagaaagcgtaatagctcactggtcgagtcggcctgcgcggaagatgtaacggggctaaaccatgcaccgaagctgcggcagcgacgcttatgcgttgttgggtaggggagcgttctgtaagcctgtgaaggtgtgctgtgaggtatgctggaggtatcagaagtgcgaatgctgacataagtaacgataaagcgggtgaaaagcccgctcgccggaagaccaagggttcctgtccaacgttaatcggggcagggtgagtcgacccctaaggcgaggccgaaaggcgtagtcgatgggaaacaggttaatattcctgtacttggtgttactgcgaaggggggacggagaaggctatgttggccgggcgacggttgtcccggtttaagcgtgtaggctggttttccaggcaaatccggaaaatcaaggccgaggcgtgatgacgaggcactacggtgctgaagcaacaaatgccctgcttccaggaaaagcctctaagcatcaggtaacatcaaatcgtaccccaaaccgacacaggtggtcaggtagagaataccaaggcgcttgagagaactcgggtgaaggaactaggcaaaatggtgccgtaacttcgggagaaggcacgctgatacgtaggtgaagcgacttgctcgtggagctgaaatcagtcgaagataccagctggctgcaactgtttattaaaaacacagcactgtgcaaacacgaaagtggacgtatacggtgtgacgcctgcccggtgccggaaggttaattgatggggttagcgcaagcgaagctcttgatcgaagccccggtaaacggcggccgtaactataacggtcctaaggtagcgaaattccttgtcgggtaagttccgacctgcacgaatggcgtaatgatggccaggctgtctccacccgagactcagtgaaattgaactcgctgtgaagatgcagtgtacccgcggcaagacggaaagaccccgtgaacctttactatagcttgacactgaacattgagccttgatgtgtaggataggtgggaggctttgaagtgtggacgccagtctgcatggagccgaccttgaaataccaccctttaatgtttgatgttctaacgtggacccgtgatccgggttgcggacagtgtctggtgggtagtttgactggggcggtctcctcctaaagagtaacggaggagcacgaaggttggctaatcctggtcggacatcaggaggttagtgcaatggcataagccagcttgactgcgagcgtgacggcgcgagcaggtgcgaaagcaggtcatagtgatccggtggttctgaatggaagggccatcgctcaacggataaaaggtactccggggataacaggctgataccgcccaagagttcatatcgacggcggtgtttggcacctcgatgtcggctcatcacatcctggggctgaagtaggtcccaagggtatggctgttcgccatttaaagtggtacgcgagctgggtttagaacgtcgtgagacagttcggtccctatctgccgtgggcgctggagaactgaggggggctgctcctagtacgagaggaccggagtggacgcatcactggtgttcgggttgtcatgccaatggcactgcccggtagctaaatgcggaagagataagtgctgaaagcatctaagcacgaaacttgccccgagatgagttctccctgaccctttaagggtcctgaaggaacgttgaagacgacgacgttgataggccgggtgtgtaaacggacatggttttcgggagggcgcttaccactttgtgattcatgactggggtgaagtcgtaacaaggtaaccgtaggggaacctgcggttggatcatgtggttaccttaaagaagcgtactttgtagtgctcacacagattgtctgatagaaagtgaaaagcaaggcgtttacgcgttgggagtgaggctgaagagaataaggccgttcgctttctattaatgaaagctcaccctacacgaaaatatcacgcaacgcgtgataagcaattttcgtgtccccttcgtctagaggcccaggacaccgccctttcacggcggtaacaggggttcgaatcccctaggggacgccacttgctggtttgtgagtgaaagtcgccgaccttaatatctcaaaactcatcttcgggtgatgtttgagatatttgctctttaaaaatctggatcaagctgaaaattgaaacactgaacaacgagagttgttcgtgagtctctcaaattttcgcaacacgatgatgaatcgaaaggcggatgagagaagattttcagcctgatacagattaaatcagaacgcagaagcggtctgataaaacagaattgcctggcggccgtagcgcggtggtcccacctgaccccatgccgaactcagaagtgaaacgccgtagcgccgatggtagtgtggggtctccccatgcgagagtagggaactgccaggcatcaaataaaacgaaaggctcagtcgaaagactgggcctttcgttttatctgttgtttgtcggtgaacgctctcctgagtaggacaaatccgccgggagcggatttgaacgttgcgaagcaacggcccggagggtggcgggcaggacgcccgccataaactgccaggcatcaaattaagcagaaggccatcctgacggatggcctttttgcgtttctacaaactcttcctgtcgtcatatctacaagccggcgcgccgggaaatgtgcgcggaacccctatttgtttatttttctaaatacattcaaatatgtatccgctcatgagacaataaccctgataaatgcttcaataatattgaaaaaggaagagtatgagtattcaacatttccgtgtcgcccttattcccttttttgcggcattttgccttcctgtttttgctcacccagaaacgctggtgaaagtaaaagatgctgaagatcagttgggtgcacgagtgggttacatcgaactggatctcaacagcggtaagatccttgagagttttcgccccgaagaacgttttccaatgatgagcacttttaaagttctgctatgtggcgcggtattatcccgtgttgacgccgggcaagagcaactcggtcgccgcatacactattctcagaatgacttggttgagtactcaccagtcacagaaaagcatcttacggatggcatgacagtaagagaattatgcagtgctgcaataaccatgagtgataacactgcggccaacttacttctgacaacgatcggaggaccgaaggagctaaccgcttttttgcacaacatgggggatcatgtaactcgccttgatcgttgggaaccggagctgaatgaagccataccaaacgacgagcgtgacaccacgatgcctgcagcaatggcaacaacgttgcgcaaactattaactggcgaactacttactctagcttcccggcaacaattaatagactggatggaggcggataaagttgcaggaccacttctgcgctcggcccttccggctagctggtttattgctgataaatctggagccggtgagcgtgggtctcgcggtatcattgcagcactggggccagatggtaagccctcccgtatcgtagttatctacacgacggggagtcaggcaactatggatgaacgaaatagacagatcgctgagataggtgcctcactgattaagcattggtaactgcagaccaagtttactcatatatactttagattgatttaaaacttcatttttaatttaaaaggatctaggtgaagatcctttttgataatctcatgaccaaaatcccttaacgtgagttttcgttccactgagcgtcagaccccgtagaaaagatcaaaggatcttcttgagatcctttttttctgcgcgtaatctgctgcttgcaaacaaaaaaaccaccgctaccagcggtggtttgtttgccggatcaagagctaccaactctttttccgaaggtaactggcttcagcagagcgcagataccaaatactgtccttctagtgtagccgtagttaggccaccacttcaagaactctgtagcaccgcctacatacctcgctctgctaatcctgttaccagtggctgctgccagtggcgataagtcgtgtcttaccgggttggactcaagacgatagttaccggataaggcgcagcggtcgggctgaacggggggttcgtgcacacagcccagcttggagcgaacgacctacaccgaactgagatacctacagcgtgagctatgagaaagcgccacgcttcccgaagggagaaaggcggacaggtatccggtaagcggcagggtcggaacaggagagcgcacgagggagcttccagggggaaacgcctggtatctttatagtcctgtcgggtttcgccacctctgacttgagcgtcgatttttgtgatgctcgtcaggggggcggagcctatggaaaaacgccagcaacgcggcctttttacggttcctggccttttgctgg

SEQ ID NO: 345 - DNA, 7391 bp, Artificial
  Synthetic
agacttagggaccctgcggccgccattaattcctaatttttgttgacactctatcattgatagagttattttaccactccctatcagtgatagagaaaagtgaaatgaatagaccggccgctgagaaaaagcgaagcggcactgctctttaacaatttatcagacaatctgtgtgggcactcgaagatacggattcttaacgtcgcaagacgaaaaatgaataccaagtctcaagagtgaacacgtaattcattacgaagtttaattctttgagcgtcaaacttttaaattgaagagtttgatcatggctcagattgaacgctggcggcaggcctaacacatgcaagtcgaacggtaacaggaagaagcttgcttctttgctgacgagtggcggacgggtgagtaatgtctgggaaactgcctgatggagggggataactactggaaacggtagctaataccgcataacgtcgcaagaccaaagagggggaccttcgggcctcttgccatcggatgtgcccagatgggattagctagtaggtggggtaacggctcacctaggcgacgatccctagctggtctgagaggatgaccagccacactggaactgagacacggtccagactcctacgggaggcagcagtggggaatattgcacaatgggcgcaagcctgatgcagccatgccgcgtgtatgaagaaggccttcgggttgtaaagtactttcagcggggaggaagggagtaaagttaatacctttgctcattgacgttacccgcagaagaagcaccggctaactccgtgccagcagccgcggtaatacggagggtgcaagcgttaatcggaattactgggcgtaaagcgcacgcaggcggtttgttaagtcagatgtgaaatccccgggctcaacctgggaactgcatctgatactggcaagcttgagtctcgtagaggggggtagaattccaggtgtagcggtgaaatgcgtagagatctggaggaataccggtggcgaaggcggccccctggacgaagactgacgctcaggtgcgaaagcgtggggagcaaacaggattagataccctggtagtccacgccgtaaacgatgtcgacttggaggttgtgcccttgaggcgtggcttccggagctaacgcgttaagtcgaccgcctggggagtacggccgcaaggttaaaactcaaatgaattgacgggggcccgcacaagcggtggagcatgtggtttaattcgatgcaacgcgaagaaccttacctggtcttgacatccacggaagttttcagagatgagaatgtgccttcgggaaccgtgagacaggtgctgcatggctgtcgtcagctcgtgttgtgaaatgttgggttaagtcccgcaacgagcgcaacccttatcctttgttgccagcggtccggccgggaactcaaaggagactgccagtgataaactggaggaaggtggggatgacgtcaagtcatcatggcccttacgaccagggctacacacgtgctacaatggcgcatacaaagagaagcgacctcgcgagagcaagcggacctcataaagtgcgtcgtagtccggattggagtctgcaactcgactccatgaagtcggaatcgctagtaatcgtggatcagaatgccacggtgaatacgttcccgggccttgtacacaccgcccgtcacaccatgggagtgggttgcaaaagaagtaggtagcttaaccggtcaacagccgtttgagctaaccggtactaatgaaccgtgaggcttaaccttgagaggttaagcgactaagcgtacacggtggatgccctggcagtcagaggcgatgaaggacgtgctaatctgcgataagcgtcggtaaggtgatatgaaccgttataaccggcgatttccgaatggggaaacccagtgtgtttcgacacactatcattaactgaatccataggttaatgaggcgaaccgggggaactgaaacatctaagtaccccgaggaaaagaaatcaaccgagattcccccagtagcggcgagcgaacggggagcagcccagagcctgaatcagtgtgtgtgttagtggaagcgtctggaaaggcgcgcgatacagggtgacagccccgtacacaaaaatgcacatgctgtgagctcgatgagtagggcgggacacgtggtatcctgtctgaatatggggggaccatcctccaaggctaaatactcctgactgaccgatagtgaaccagtaccgtgagggaaaggcgaaaagaaccccggcgaggggagtgaaaaagaacctgaaaccgtgtacgtacaagcagtgggagcacgcttaggcgtgtgactgcgtaccttttgtataatgggtcagcgacttatattctgtagcaaggttaaccgaataggggagccgaagggaaaccgagtcttaactgggcgttaagttgcagggtatagacccgaaacccggtgatctagccatgggcaggttgaaggttgggtaacactaactggaggaccgaaccgactaatgttgaaaaattagcggatgacttgtggctgggggtgaaaggccaatcaaaccgggagatagctggttctccccgaaagctatttaggtagcgcctcgtgaattcatctccgggggtagagcactgtttcggcaagggggtcatcccgacttaccaacccgatgcaaactgcgaataccggagaatgttatcacgggagacacacggcgggtgctaacgtccgtcgtgaagagggaaacaacccagaccgccagctaaggtcccaaagtcatggttaagtgggaaacgatgtgggaaggcccagacagccaggatgttggcttagaagcagccatcatttaaagaaagcgtaatagctcactggtcgagtcggcctgcgcggaagatgtaacggggctaaaccatgcaccgaagctgcggcagcgacgcttatgcgttgttgggtaggggagcgttctgtaagcctgcgaaggtgtgctgtgaggcatgctggaggtatcagaagtgcgaatgctgacataagtaacgataaagcgggtgaaaagcccgctcgccggaagaccaagggttcctgtccaacgttaatcggggcagggtgagtcgacccctaaggcgaggccgaaaggcgtagtcgatgggaaacaggttaatattcctgtacttggtgttactgcgaaggggggacggagaaggctatgttggccgggcgacggttgtcccggtttaagcgtgtaggctggttttccaggcaaatccggaaaatcaaggctgaggcgtgatgacgaggcactacggtgctgaagcaacaaatgccctgcttccaggaaaagcctctaagcatcaggtaacatcaaatcgtaccccaaaccgacacaggtggtcaggtagagaataccaaggcgcttgagagaactcgggtgaaggaactaggcaaaatggtgccgtaacttcgggagaaggcacgctgatatgtaggtgaggtccctcgcggatggagctgaaatcagtcgaagataccagctggctgcaactgtttattaaaaacacagcactgtgcaaacacgaaagtggacgtatacggtgtgacgcctgcccggtgccggaaggttaattgatggggttagcgcaagcgaagctcttgatcgaagccccggtaaacggcggccgtaactataacggtcctaaggtagcgaaattccttgtcgggtaagttccgacctgcacgaatggcgtaatgatggccaggctgtctccacccgagactcagtgaaattgaactcgctgtgaagatgcagtgtacccgcggcaagacggaaagaccccgtgaacctttactatagcttgacactgaacattgagccttgatgtgtaggataggtgggaggctttgaagtgtggacgccagtctgcatggagccgaccttgaaataccaccctttaatgtttgatgttctaacgttgacccgtaatccgggttgcggacagtgtctggtgggtagtttgactggggcggtctcctcctaaagagtaacggaggagcacgaaggttggctaatcctggtcggacatcaggaggttagtgcaatggcataagccagcttgactgcgagcgtgacggcgcgagcaggtgcgaaagcaggtcatagtgatccggtggttctgaatggaagggccatcgctcaacggataaaaggtactccggggataacaggctgataccgcccaagagttcatatcgacggcggtgtttggcacctcgatgtcggctcatcacatcctggggctgaagtaggtcccaagggtatggctgttcgccatttaaagtggtacgcgagctgggtttagaacgtcgtgagacagttcggtccctatctgccgtgggcgctggagaactgaggggggctgctcctagtacgagaggaccggagtggacgcatcactggtgttcgggttgtcatgccaatggcactgcccggtagctaaatgcggaagagataagtgctgaaagcatctaagcacgaaacttgccccgagatgagttctccctgaccctttaagggtcctgaaggaacgttgaagacgacgacgttgataggccgggtgtgtaaacggacatggttggagggcgcttaccactttgtgattcatgactggggtgaagtcgtaacaaggtaaccgtaggggaacctgcggttggatcatgtggttaccttaaagaagcgtactttgtagtgctcacacagattgtctgatagaaagtgaaaagcaaggcgtttacgcgttgggagtgaggctgaagagaataaggccgttcgctttctattaatgaaagctcaccctacacgaaaatatcacgcaacgcgtgataagcaattttcgtgtccccttcgtctagaggcccaggacaccgccctttcacggcggtaacaggggttcgaatcccctaggggacgccacttgctggtttgtgagtgaaagtcgccgaccttaatatctcaaaactcatcttcgggtgatgtttgagatatttgctctttaaaaatctggatcaagctgaaaattgaaacactgaacaacgagagttgttcgtgagtctctcaaattttcgcaacacgatgatgaatcgaaaggcggatgagagaagattttcagcctgatacagattaaatcagaacgcagaagcggtctgataaaacagaatttgcctggcggcagtagcgcggtggtcccacctgaccccatgccgaactcagaagtgaaacgccgtagcgccgatggtagtgtggggtctccccatgcgagagtagggaactgccaggcatcaaataaaacgaaaggctcagtcgaaagactgggcctttcgttttatctgttgtttgtcggtgaacgctctcctgagtaggacaaatccgccgggagcggatttgaacgttgcgaagcaacggcccggagggtggcgggcaggacgcccgccataaactgccaggcatcaaattaagcagaaggccatcctgacggatggcctttttgcgtttctacaaactcttcctgtcgtcatatctacaagccggcgcgccgggaaatgtgcgcggaacccctatttgtttatttttctaaatacattcaaatatgtatccgctcatgagacaataaccctgataaatgcttcaataatattgaaaaaggaagagtatgagtattcaacatttccgtgtcgcccttattcccttttttgcggcattttgccttcctgtttttgctcacccagaaacgctggtgaaagtaaaagatgctgaagatcagttgggtgcacgagtgggttacatcgaactggatctcaacagcggtaagatccttgagagttttcgccccgaagaacgttttccaatgatgagcacttttaaagttctgctatgtggcgcggtattatcccgtgttgacgccgggcaagagcaactcggtcgccgcatacactattctcagaatgacttggttgagtactcaccagtcacagaaaagcatcttacggatggcatgacagtaagagaattatgcagtgctgcaataaccatgagtgataacactgcggccaacttacttctgacaacgatcggaggaccgaaggagctaaccgcttttttgcacaacatgggggatcatgtaactcgccttgatcgttgggaaccggagctgaatgaagccataccaaacgacgagcgtgacaccacgatgcctgcagcaatggcaacaacgttgcgcaaactattaactggcgaactacttactctagcttcccggcaacaattaatagactggatggaggcggataaagttgcaggaccacttctgcgctcggcccttccggctagctggtttattgctgataaatctggagccggtgagcgtgggtctcgcggtatcattgcagcactggggccagatggtaagccctcccgtatcgtagttatctacacgacggggagtcaggcaactatggatgaacgaaatagacagatcgctgagataggtgcctcactgattaagcattggtaactgcagaccaagtttactcatatatactttagattgatttaaaacttcatttttaatttaaaaggatctaggtgaagatcctttttgataatctcatgaccaaaatcccttaacgtgagttttcgttccactgagcgtcagaccccgtagaaaagatcaaaggatcttcttgagatcctttttttctgcgcgtaatctgctgcttgcaaacaaaaaaaccaccgctaccagcggtggtttgtttgccggatcaagagctaccaactctttttccgaaggtaactggcttcagcagagcgcagataccaaatactgtccttctagtgtagccgtagttaggccaccacttcaagaactctgtagcaccgcctacatacctcgctctgctaatcctgttaccagtggctgctgccagtggcgataagtcgtgtcttaccgggttggactcaagacgatagttaccggataaggcgcagcggtcgggctgaacggggggttcgtgcacacagcccagcttggagcgaacgacctacaccgaactgagatacctacagcgtgagctatgagaaagcgccacgcttcccgaagggagaaaggcggacaggtatccggtaagcggcagggtcggaacaggagagcgcacgagggagcttccagggggaaacgcctggtatctttatagtcctgtcgggtttcgccacctctgacttgagcgtcgatttttgtgatgctcgtcaggggggcggagcctatggaaaaacgccagcaacgcggcctttttacggttcctggccttttgctgg

SEQ ID NO: 346 - DNA, 7484 bp, Artificial
  Synthetic
agacttagggaccctgcggccgccattaattcctaatttttgttgacactctatcattgatagagttattttaccactccctatcagtgatagagaaaagtgaaatgaatagaccggccgctgagaaaaagcgaagcggcactgctctttaacaatttatcagacaatctgtgtgggcactcgaagatacggattcttaacgtcgcaagacgaaaaatgaataccaagtctcaagagtgaacacgtaattcattacgaagtttaattctttgagcgtcaaacttttaaattgaagagtttgatcatggctcagattgaacgctggcggcaggcctaacacatgcaagtcgaacggtaacaggaagcagcttgctgcttcgctgacgagtggcggacgggtgagtaatgtctgggaaactgcctgatggagggggataactactggaaacggtggctaataccgcataacgtcgcaagaccaaagagggggaccttcgggcctcttgccatcagatgtgcccagatgggattagctagttggtgaggtaacggctcaccaaggcgacgatccctagctggtctgagaggatgaccagccacactggaactgagacacggtccagactcctacgggaggcagcagtggggaatattgcacaatgggcgcaagcctgatgcagccatgccgcgtgtatgaagaaggccttcgggttgtaaagtactttcagcggggaggaaggtgttgtggttaataaccgcagcaattgacgttacccgcagaagaagcaccggctaactccgtgccagcagccgcggtaatacggagggtgcaagcgttaatcggaattactgggcgtaaagcgcacgcaggcggtctgtcaagtcggatgtgaaatccccgggctcaacctgggaactgcattcgaaactggcaggcttgagtcttgtagaggggggtagaattccaggtgtagcggtgaaatgcgtagagatctggaggaataccggtggcgaaggcggccccctggacaaagactgacgctcaggtgcgaaagcgtggggagcaaacaggattagataccctggtagtccacgccgtaaacgatgtctacttggaggttgtgcccttgaggcgtggcttccggagctaacgcgttaagtagaccgcctggggagtacggccgcaaggttaaaactcaaatgaattgacgggggcccgcacaagcggtggagcatgtggtttaattcgatgcaacgcgaagaaccttacctggtcttgacatccacagaactttccagagatggattggtgccttcgggaactgtgagacaggtgctgcatggctgtcgtcagctcgtgttgtgaaatgttgggttaagtcccgcaacgagcgcaacccttatcctttgttgccagcgattaggtcgggaactcaaaggagactgccagtgataaactggaggaaggtggggatgacgtcaagtcatcatggcccttacgaccagggctacacacgtgctacaatggcgcatacaaagagaagcgacctcgcgagagcaagcggacctcataaagtgcgtcgtagtccggattggagtctgcaactcgactccatgaagtcggaatcgctagtaatcgtggatcagaatgccacggtgaatacgttcccgggccttgtacacaccgcccgtcacaccatgggagtgggttgcaaaagaagtaggtagcttaaccggtcaacagccgtttgagctaaccggtactaatgaaccgtgaggcttaaccttgagaggttaagcgactaagcgtacacggtggatgccctggcagtcagaggcgatgaagggcgtgctaatctgcgataagcgccggtaaggtgatatgaaccgttataaccggcgatacccgaatggggaaacccagtgtgattcgtcacactatcattaactgaatccataggttaatgaggcgaaccgggggaactgaaacatctaagtaccccgaggaaaagaaatcaaccgagattcccccagtagcggcgagcgaacggggaggagcccagagcctgaatcagcatgtgtgttagtggaagcgtctggaaaggtgcgcgatacagggtgacagccccgtacacaaaagcgcatgtgctgtgagctcgatgagtagggcgggacacgtggtatcctgtctgaatatggggggaccatcctccaaggctaaatactcctgactgaccgatagtgaaccagtaccgtgagggaaaggcgaaaagaaccccggcgaggggagtgaaaaagaacctgaaaccgtgtacgtacaagcagtgggagcacaggtttacctgtgtgactgcgtaccttttgtataatgggtcagcgacttatattctgtagcaaggttaaccgtataggggagccgtagggaaaccgagtcttaaccgggcgttaagttgcagggtatagacccgaaacccggtgatctagccatgggcaggttgaaggttgggtaacactaactggaggaccgaaccgactaatgttgaaaaattagcggatgacctgtggctgggggtgaaaggccaatcaaaccgggagatagctggttctccccgaaagctatttaggtagcgcctcgtgaattcatctccgggggtagagcactgtttcggctagggggccatcccggcttaccaacccgatgcaaactgcgaataccggagaatgttatcacgggagacacacggcgggtgctaacgtccgtcgtgaagagggaaacaacccagaccgccagctaaggtcccaaagtcatggttaagtgggaaacgatgtgggaaggcccagacagccaggatgttggcttagaagcagccatcatttaaagaaagcgtaatagctcactggtcgagtcggcctgcgcggaagatgtaacggggctaaaccatgcaccgaagctgcggcagcgaacgtatcacccaagacaactttacggagttgacgattgacggagcgaagcgacgtcaaagcgttcattaaagtcgagttggcttagggatacgttcgttgggtaggggagcgttctgtaagcctgtgaaggtgtgtcgtgaggcatgctggaggtatcagaagtgcgaatgctgacataagtaacgataaagcgggtgaaaagcccgctcgccggaagaccaagggttcctgtccaacgttaatcggggcagggtgagtcgacccctaaggcgaggccgaaaggcgtagtcgatgggaaacgggttaatattcccgtacttggtgttactgcgaaggggggacggagaaggctatgttggccgggcgacggttgtcccggtttaagcgtgtaggtgtgtgttccaggtaaatccggttcactttaacactgaggcgtgacgacgaggcactacggtgctgaagcaacaaatgccctgcttccaggaaaagcctctaagcatcaggtaacacgaaatcgtaccccaaaccgacacaggtggtcaggtagagaataccaaggcgcttgagagaactcgggtgaaggaactaggcaaaatggtgccgtaacttcgggagaaggcacgctgacacgtaggtgaagtgatttactcatggagctgaagtcagtcgaagataccagctggctgcaactgtttattaaaaacacagcactgtgcaaacacgaaagtggacgtatacggtgtgacgcctgcccggtgccggaaggttaattgatggggtcagcgcaagcgaagctcctgatcgaagccccggtaaacggcggccgtaactataacggtcctaaggtagcgaaattccttgtcgggtaagttccgacctgcacgaatggcgtaatgatggccaggctgtctccacccgagactcagtgaaattgaactcgctgtgaagatgcagtgtacccgcggcaagacggaaagaccccgtgaacctttactatagcttgacactgaacattgagccttgatgtgtaggataggtgggaggctttgaagtgtggacgccagtctgcatggagccgaccttgaaataccaccctttaatgtttgatgttctaacgtggacccgtaatccgggttgcggacagtgtctggtgggtagtttgactggggcggtctcctcctaaagagtaacggaggagcacgaaggttggctaatcctggtcggacatcaggaggttagtgcaatggcataagccagcttgactgcgagcgtgacggcgcgagcaggtgcgaaagcaggtcatagtgatccggtggttctgaatggaagggccatcgctcaacggataaaaggtactccggggataacaggctgataccgcccaagagttcatatcgacggcggtgtttggcacctcgatgtcggctcatcacatcctggggctgaagtaggtcccaagggtatggctgttcgccatttaaagtggtacgcgagctgggtttagaacgtcgtgagacagttcggtccctatctgccgtgggcgctggagaactgaggggggctgctcctagtacgagaggaccggagtggacgcatcactggtgttcgggttgtcatgccaatggcactgcccggtagctaaatgcggaagagataagtgctgaaagcatctaagcacgaaacttgccccgagatgagttctccctgagacttagagtctcctgaaggaacgttgaagacgacgacgttgataggccgggtgtgtaaacggacatggttttcgggagggcgcttaccactttgtgattcatgactggggtgaagtcgtaacaaggtaaccgtaggggaacctgcggttggatcatgtggttaccttaaagaagcgtactttgtagtgctcacacagattgtctgatagaaagtgaaaagcaaggcgtttacgcgttgggagtgaggctgaagagaataaggccgttcgctttctattaatgaaagctcaccctacacgaaaatatcacgcaacgcgtgataagcaattttcgtgtccccttcgtctagaggcccaggacaccgccctttcacggcggtaacaggggttcgaatcccctaggggacgccacttgctggtttgtgagtgaaagtcgccgaccttaatatctcaaaactcatcttcgggtgatgtttgagatatttgctctttaaaaatctggatcaagctgaaaattgaaacactgaacaacgagagttgttcgtgagtctctcaaattttcgcaacacgatgatgaatcgaaaggcggatgagagaagattttcagcctgatacagattaaatcagaacgcagaagcggtctgataaaacagaattttgcctggcggccgtagcgcggtggtcccacctgaccccatgccgaactcagaagtgaaacgccgtagcgccgatggtagtgtggggtctccccatgcgagagtagggaactgccaggcatcaaataaaacgaaaggctcagtcgaaagactgggcctttcgttttatctgttgtttgtcggtgaacgctctcctgagtaggacaaatccgccgggagcggatttgaacgttgcgaagcaacggcccggagggtggcgggcaggacgcccgccataaactgccaggcatcaaattaagcagaaggccatcctgacggatggcctttttgcgtttctacaaactcttcctgtcgtcatatctacaagccggcgcgccgggaaatgtgcgcggaacccctatttgtttatttttctaaatacattcaaatatgtatccgctcatgagacaataaccctgataaatgcttcaataatattgaaaaaggaagagtatgagtattcaacatttccgtgtcgcccttattcccttttttgcggcattttgccttcctgtttttgctcacccagaaacgctggtgaaagtaaaagatgctgaagatcagttgggtgcacgagtgggttacatcgaactggatctcaacagcggtaagatccttgagagttttcgccccgaagaacgttttccaatgatgagcacttttaaagttctgctatgtggcgcggtattatcccgtgttgacgccgggcaagagcaactcggtcgccgcatacactattctcagaatgacttggttgagtactcaccagtcacagaaaagcatcttacggatggcatgacagtaagagaattatgcagtgctgcaataaccatgagtgataacactgcggccaacttacttctgacaacgatcggaggaccgaaggagctaaccgcttttttgcacaacatgggggatcatgtaactcgccttgatcgttgggaaccggagctgaatgaagccataccaaacgacgagcgtgacaccacgatgcctgcagcaatggcaacaacgttgcgcaaactattaactggcgaactacttactctagcttcccggcaacaattaatagactggatggaggcggataaagttgcaggaccacttctgcgctcggcccttccggctagctggtttattgctgataaatctggagccggtgagcgtgggtctcgcggtatcattgcagcactggggccagatggtaagccctcccgtatcgtagttatctacacgacggggagtcaggcaactatggatgaacgaaatagacagatcgctgagataggtgcctcactgattaagcattggtaactgcagaccaagtttactcatatatactttagattgatttaaaacttcatttttaatttaaaaggatctaggtgaagatcctttttgataatctcatgaccaaaatcccttaacgtgagttttcgttccactgagcgtcagaccccgtagaaaagatcaaaggatcttcttgagatcctttttttctgcgcgtaatctgctgcttgcaaacaaaaaaaccaccgctaccagcggtggtttgtttgccggatcaagagctaccaactctttttccgaaggtaactggcttcagcagagcgcagataccaaatactgtccttctagtgtagccgtagttaggccaccacttcaagaactctgtagcaccgcctacatacctcgctctgctaatcctgttaccagtggctgctgccagtggcgataagtcgtgtcttaccgggttggactcaagacgatagttaccggataaggcgcagcggtcgggctgaacggggggttcgtgcacacagcccagcttggagcgaacgacctacaccgaactgagatacctacagcgtgagctatgagaaagcgccacgcttcccgaagggagaaaggcggacaggtatccggtaagcggcagggtcggaacaggagagcgcacgagggagcttccagggggaaacgcctggtatctttatagtcctgtcgggtttcgccacctctgacttgagcgtcgatttttgtgatgctcgtcaggggggcggagcctatggaaaaacgccagcaacgcggcctttttacggttcctggccttttgctgg

SEQ ID NO: 347 - DNA, 7395 bp, Artificial
  Synthetic
agacttagggaccctgcggccgccattaattcctaatttttgttgacactctatcattgatagagttattttaccactccctatcagtgatagagaaaagtgaaatgaatagaccggccgctgagaaaaagcgaagcggcactgctctttaacaatttatcagacaatctgtgtgggcactcgaagatacggattcttaacgtcgcaagacgaaaaatgaataccaagtctcaagagtgaacacgtaattcattacgaagtttaattctttgagcgtcaaacttttaaattgaagagtttgatcatggctcagattgaacgctggcggcaggcctaacacatgcaagtcgaacggtagcacagagagcttgctctcgggtgacgagtggcggacgggtgagtaatgtctgggaaactgcccgatggagggggataactactggaaacggtagctaataccgcataacgtcgcaagaccaaagagggggaccttcgggcctcttgccatcggatgtgcccagatgggattagctagtaggtggggtaacggctcacctaggcgacgatccctagctggtctgagaggatgaccagccacactggaactgagacacggtccagactcctacgggaggcagcagtggggaatattgcacaatgggcgcaagcctgatgcagccatgccgcgtgtatgaagaaggccttcgggttgtaaagtactttcagcgaggaggaaggcgttgtggttaataaccgcaacgattgacgttactcgcagaagaagcaccggctaactccgtgccagcagccgcggtaatacggagggtgcaagcgttaatcggaattactgggcgtaaagcgcacgcaggcggtctgtcaagtcggatgtgaaatccccgggctcaacctgggaactgcatccgaaactggcaggctagagtcttgtagaggggggtagaattccaggtgtagcggtgaaatgcgtagagatctggaggaataccggtggcgaaggcggccccctggacaaagactgacgctcaggtgcgaaagcgtggggagcaaacaggattagataccctggtagtccacgccgtaaacgatgtcgacttggaggttgtgcccttgaggcgtggcttccggagctaacgcgttaagtcgaccgcctggggagtacggccgcaaggttaaaactcaaatgaattgacgggggcccgcacaagcggtggagcatgtggtttaattcgatgcaacgcgaagaaccttacctactcttgacatccagagaacttagcagagatgctttggtgccttcgggaactctgagacaggtgctgcatggctgtcgtcagctcgtgttgtgaaatgttgggttaagtcccgcaacgagcgcaacccttatcctttgttgccagcggtccggccgggaactcaaaggagactgccagtgataaactggaggaaggtggggatgacgtcaagtcatcatggcccttacgagtagggctacacacgtgctacaatggcatatacaaagagaagcgacctcgcgagagcaagcggacctcataaagtatgtcgtagtccggattggagtctgcaactcgactccatgaagtcggaatcgctagtaatcgtggatcagaatgccacggtgaatacgttcccgggccttgtacacaccgcccgtcacaccatgggagtgggttgcaaaagaagtaggtagcttaaccggtcaacagccgtttgagctaaccgatactaatgaaccgtgaggcttaaccttgagaggttaagcgactaagcgtacacggtggatgccctggcagtcagaggcgatgaaggacgtgctaatctgcgataagcgtcggtaaggtgatatgaaccgttataaccggcgatttccgaatggggaaacccagtgtgattcgtcacactatcgttaactgaatacataggttaacgaagcgaaccgggggaactgaaacatctaagtaccccgaggaaaagaaatcaaccgagattcccccagtagcggcgagcgaacggggagcagcccagagtctgaatcagcttgtgtgttagtggaacggtctggaaagtccgacggtacagggtgatagtcccgtacaccaaaatgcacaggttgtgaactcgaagagtagggcgggacacgtggtatcctgtctgaatatggggggaccatcctccaaggctaaatactcctgactgaccgatagtgaaccagtaccgtgagggaaaggcgaaaagaaccccggcgaggggagtgaaaaagaacctgaaaccgtgtacgtacaagcagtgggagcctctttatggggtgactgcgtaccttttgtataatgggtcagcgacttatattctgtagcaaggttaaccgtataggggagccgaagggaaaccgagtcttaactgggcgttaagttgcagggtatagacccgaaacccggtgatctagccatgggcaggttgaaggttgggtaacactaactggaggaccgaaccgactaatgttgaaaaattagcggatgacttgtggctgggggtgaaaggccaatcaaaccgggagatagctggttctccccgaaagctatttaggtagcgcctcgtgaactcatcttcgggggtagagcactgtttcggctagggggtcatcccgacttaccaacccgatgcaaactgcgaataccgaagaatgttatcacgggagacacacggcgggtgctaacgtccgtcgtgaagagggaaacaacccagaccgccagctaaggtcccaaagtcatggttaagtgggaaacgatgtgggaaggcacagacagccaggatgttggcttagaagcagccatcatttaaagaaagcgtaatagctcactggtcgagtcggcctgcgcggaagatgtaacggggctaaaccatgcaccgaagctgcggcagcgacactatgtgttgttgggtaggggagcgttctgtaagccgttgaaggtgtgctgtgaggcatgctggaggtatcagaagtgcgaatgctgacataagtaacgataatgcaggtgaaaaacccgcacgccggaagaccaagggttcctgtccaacgttaatcggggcagggtgagtcgacccctaaggcgaggccgaaaggcgtagtcgatgggaaacaggttaatattcctgtacttggtgttactgcgaaggggggacggagaaggctatgttagccgggcgacggttgtcccggtttaagcatgtaggcggaggttccaggtaaatccggtacctttttaacgctgaggtgtgatgacgaggcactacggtgctgaagtaacaaatgccctgcttccaggaaaagcctctaagcatcaggtaacacgaaatcgtaccccaaaccgacacaggtggtcaggtagagaataccaaggcgcttgagagaactcgggtgaaggaactaggcaaaatggtgccgtaacttcgggagaaggcacgctgatatgtaggtgaagtgatttactcatggagctgaaatcagtcgaagataccagctggctgcaactgtttattaaaaacacagcactgtgcaaacacgaaagtggacgtatacggtgtgacgcctgcccggtgccggaaggttaattgatggggttatccgtaaggagaagctcttgatcgaagccccggtaaacggcggccgtaactataacggtcctaaggtagcgaaattccttgtcgggtaagttccgacctgcacgaatggcgtaatgatggccaggctgtctccacccgagactcagtgaaattgaactcgctgtgaagatgcagtgtacccgcggcaagacggaaagaccccgtgaacctttactatagcttgacactgaacactggtccttgatgtgtaggataggtgggaggctttgaagtgtggacgccagtctgcatggagccatccttgaaataccaccctttaatggctggtgttctaacgtggacccgttacccgggttgcggacagtgtctggtgggtagtttgactggggcggtctcctcctaaagagtaacggaggagcacgaaggttagctaatcctggtcggacatcaggaggttagtgcaaaggcataagctagcttgactgcgagagtgacggctcgagcaggtgcgaaagcaggtcttagtgatccggtggttctgaatggaagggccatcgctcaacggataaaaggtactccggggataacaggctgataccgcccaagagttcatatcgacggcggtgtttggcacctcgatgtcggctcatcacatcctggggctgaagtaggtcccaagggtatggctgttcgccatttaaagtggtacgcgagctgggtttagaacgtcgtgagacagttcggtccctatctgccgtgggcgctggagaattgaggggggctgctcctagtacgagaggaccggagtggacgcatcactggtgttcgggttgtcatgccaatggcattgcccggtagctaaatgcggaagagataagtgctgaaagcatctaagcacgaaacttgccccgagatgagttctccctgagactataagtctcctgaaggaacgttgaagacgacgacgttgataggtcgggtgtgtaaacggacatggttttcgggagggcgcttaccactttgtgattcatgactggggtgaagtcgtaacaaggtaaccgtaggggaacctgcggttggatcatgtggttaccttaaagaagcgtactttgtagtgctcacacagattgtctgatagaaagtgaaaagcaaggcgtttacgcgttgggagtgaggctgaagagaataaggccgttcgctttctattaatgaaagctcaccctacacgaaaatatcacgcaacgcgtgataagcaattttcgtgtccccttcgtctagaggcccaggacaccgccctttcacggcggtaacaggggttcgaatcccctaggggacgccacttgctggtttgtgagtgaaagtcgccgaccttaatatctcaaaactcatcttcgggtgatgtttgagatatttgctctttaaaaatctggatcaagctgaaaattgaaacactgaacaacgagagttgttcgtgagtctctcaaattttcgcaacacgatgatgaatcgaaaggcggatgagagaagattttcagcctgatacagattaaatcagaacgcagaagcggtctgataaaacagaattgcctggcggctgtagcgcggtggtcccacctgaccccatgccgaactcagaagtgaaacgccgtagcgccgatggtagtgtggggtctccccatgcgagagtagggaactgccaggcatcaaataaaacgaaaggctcagtcgaaagactgggcctttcgttttatctgttgtttgtcggtgaacgctctcctgagtaggacaaatccgccgggagcggatttgaacgttgcgaagcaacggcccggagggtggcgggcaggacgcccgccataaactgccaggcatcaaattaagcagaaggccatcctgacggatggcctttttgcgtttctacaaactcttcctgtcgtcatatctacaagccggcgcgccgggaaatgtgcgcggaacccttatttgtttatttttctaaatacattcaaatatgtatccgctcatgagacaataaccctgataaatgcttcaataatattgaaaaaggaagagtatgagtattcaacatttccgtgtcgcccttattcccttttttgcggcattttgccttcctgtttttgctcacccagaaacgctggtgaaagtaaaagatgctgaagatcagttgggtgcacgagtgggttacatcgaactggatctcaacagcggtaagatccttgagagttttcgccccgaagaacgttttccaatgatgagcacttttaaagttctgctatgtggcgcggtattatcccgtgttgacgccgggcaagagcaactcggtcgccgcatacactattctcagaatgacttggttgagtactcaccagtcacagaaaagcatcttacggatggcatgacagtaagagaattatgcagtgctgcaataaccatgagtgataacactgcggccaacttacttctgacaacgatcggaggaccgaaggagctaaccgcttttttgcacaacatgggggatcatgtaactcgccttgatcgttgggaaccggagctgaatgaagccataccaaacgacgagcgtgacaccacgatgcctgcagcaatggcaacaacgttgcgcaaactattaactggcgaactacttactctagcttcccggcaacaattaatagactggatggaggcggataaagttgcaggaccacttctgcgctcggcccttccggctagctggtttattgctgataaatctggagccggtgagcgtgggtctcgcggtatcattgcagcactggggccagatggtaagccctcccgtatcgtagttatctacacgacggggagtcaggcaactatggatgaacgaaatagacagatcgctgagataggtgcctcactgattaagcattggtaactgcagaccaagtttactcatatatactttagattgatttaaaacttcatttttaatttaaaaggatctaggtgaagatcctttttgataatctcatgaccaaaatcccttaacgtgagttttcgttccactgagcgtcagaccccgtagaaaagatcaaaggatcttcttgagatcctttttttctgcgcgtaatctgctgcttgcaaacaaaaaaaccaccgctaccagcggtggtttgtttgccggatcaagagctaccaactctttttccgaaggtaactggcttcagcagagcgcagataccaaatactgtccttctagtgtagccgtagttaggccaccacttcaagaactctgtagcaccgcctacatacctcgctctgctaatcctgttaccagtggctgctgccagtggcgataagtcgtgtcttaccgggttggactcaagacgatagttaccggataaggcgcagcggtcgggctgaacggggggttcgtgcacacagcccagcttggagcgaacgacctacaccgaactgagatacctacagcgtgagctatgagaaagcgccacgcttcccgaagggagaaaggcggacaggtatccggtaagcggcagggtcggaacaggagagcgcacgagggagcttccagggggaaacgcctggtatctttatagtcctgtcgggtttcgccacctctgacttgagcgtcgatttttgtgatgctcgtcaggggggcggagcctatggaaaaacgccagcaacgcggcctttttacggttcctggccttttgctgg

SEQ ID NO: 348 - DNA, 7393 bp, Artificial
  Synthetic
agacttagggaccctgcggccgccattaattcctaatttttgttgacactctatcattgatagagttattttaccactccctatcagtgatagagaaaagtgaaatgaatagaccggccgctgagaaaaagcgaagcggcactgctctttaacaatttatcagacaatctgtgtgggcactcgaagatacggattcttaacgtcgcaagacgaaaaatgaataccaagtctcaagagtgaacacgtaattcattacgaagtttaattctttgagcgtcaaacttttaaattgaagagtttgatcatggctcagattgaacgctggcggcaggcctaacacatgcaagtcgagcggtagcacagagagcttgctctcgggtgacgagcggcggacgggtgagtaatgtctgggaaactgcctgatggagggggataactactggaaacggtagctaataccgcataacgtcgcaagaccaaagtgggggaccttcgggcctcatgccatcagatgtgcccagatgggattagctagtaggtggggtaatggctcacctaggcgacgatccctagctggtctgagaggatgaccagccacactggaactgagacacggtccagactcctacgggaggcagcagtggggaatattgcacaatgggcgcaagcctgatgcagccatgccgcgtgtatgaagaaggccttcgggttgtaaagtactttcagcgaggaggaaggcgttaaggttaataaccttggcgattgacgttactcgcagaagaagcaccggctaactccgtgccagcagccgcggtaatacggagggtgcaagcgttaatcggaattactgggcgtaaagcgcacgcaggcggtctgtcaagtcggatgtgaaatccccgggctcaacctgggaactgcattcgaaactggcaggctagagtcttgtagaggggggtagaattccaggtgtagcggtgaaatgcgtagagatctggaggaataccggtggcgaaggcggccccctggacaaagactgacgctcaggtgcgaaagcgtggggagcaaacaggattagataccctggtagtccacgccgtaaacgatgtcgacttggaggttgtgcccttgaggcgtggcttccggagctaacgcgttaagtcgaccgcctggggagtacggccgcaaggttaaaactcaaatgaattgacgggggcccgcacaagcggtggagcatgtggtttaattcgatgcaacgcgaagaaccttacctactcttgacatccagagaacttagcagagatgctttggtgccttcgggaactctgagacaggtgctgcatggctgtcgtcagctcgtgttgtgaaatgttgggttaagtcccgcaacgagcgcaacccttatcctttgttgccagcgattcggtcgggaactcaaaggagactgccagtgataaactggaggaaggtggggatgacgtcaagtcatcatggcccttacgagtagggctacacacgtgctacaatggcatatacaaagagaagcgacctcgcgagagcaagcggacctcataaagtatgtcgtagtccggattggagtctgcaactcgactccatgaagtcggaatcgctagtaatcgtagatcagaatgctacggtgaatacgttcccgggccttgtacacaccgcccgtcacaccatgggagtgggttgcaaaagaagtaggtagcttaaccggtcaacagccgtttgagctaaccgatactaatgaaccgtgaggcttaaccttgagaggttaagcgactaagcgtacacggtggatgccctggcagtcagaggcgatgaaggacgtgctaatctgcgaaaagcgtcggtaaggtgatatgaaccgttacagccggcgatgtccgaatggggaaacccagtgtgattcgtcacactatcgttaactgaatacataggttaacgaggcgaaccgggggaactgaaacatctaagtaccccgaggaaaagaaatcaaccgagattcccccagtagcggcgagcgaacggggagcagcccagagtctgaatcagcttgtgtgttagtggaacggtctggaaagtccgacggtacagggtgatagtcccgtacaccaaaatgcacaggctgtgaactcgaagagtagggcgggacacgtggtatcctgtctgaatatggggggaccatcctccaaggctaaatactcctgactgaccgatagtgaaccagtaccgtgagggaaaggcgaaaagaaccccggcgaggggagtgaaaaagaacctgaaaccgtgtacgtacaagcagtgggagcacctttatggtgtgactgcgtaccttttgtataatgggtcagcgacttatattctgtagcaaggttaaccgtataggggagccgcagggaaaccgagtcttaactgggcgttaagttgcagggtatagacccgaaacccggtgatctagccatgggcaggttgaaggttgggtaacactaactggaggaccgaaccgactaatgttgaaaaattagcggatgacttgtggctgggggtgaaaggccaatcaaaccgggagatagctggttctccccgaaagctatttaggtagcgcctcgtgaattcatcttcgggggtagagcactgtttcggctagggggtcatcccgacttaccaacccgatgcaaactacgaataccgaagaatgttatcacgggagacacacggcgggtgctaacgtccgtcgtgaagagggaaacaacccagaccgccagctaaggtcccaaagtcacagttaagtgggaaacgatgtgggaaggcacagacagccaggatgttggcttagaagcagccatcatttaaagaaagcgtaatagctcactggtcgagtcggcctgcgcggaagatgtaacggggctaaactgtgcaccgaagctgcggcagcgacactatgtgttgttgggtaggggagcgttctgtaagcctgcgaaggtggcctgtgagggttgctggaggtatcagaagtgcgaatgctgacataagtaacgataatgcgggtgaaaagcccgcacgccggaagaccaagggttcctgtccaacgttaatcggggcagggtgagtcgacccctaaggcgaggccgaaaggcgtagtcgatgggaaacaggttaatattcctgtacttggtgttactgcgaaggggggacggagaaggctatgttagccgggcgacggttgtcccggtttaagcatgtaggcggaggttccaggtaaatccggtaccttttaacgctgaggtgtgatgacgaggcactacggtgctgaagtaacaaatgccctgcttccaggaaaagcctctaagcatcaggtaacattgaatcgtaccccaaaccgacacaggtggtcaggtagagaataccaaggcgcttgagagaactcgggtgaaggaactaggcaaaatggtgccgtaacttcgggagaaggcacgctgatatgtaggtgaagtccctgcggatggagctgaaatcagtcgaagataccagctggctgcaactgtttattaaaaacacagcactgtgcaaacacgaaagtggacgtatacggtgtgacgcctgcccggtgccggaaggttaattgatggggttatccgtaaggagaagctcttgatcgaagccccggtaaacggcggccgtaactataacggtcctaaggtagcgaaattccttgtcgggtaagttccgacctgcacgaatggcgtaatgatggccaggctgtctccacccgagactcagtgaaattgaactcgctgtgaagatgcagtgtacccgcggcaagacggaaagaccccgtgaacctttactatagcttgacactgaacattgagccttgatgtgtaggataggtgggaggctttgaagcgtggacgccagtctgcgtggagccaaccttgaaataccaccctttaatgtttgatgttctaacgttggcccctaatcggggttgcggacagtgtctggtgggtagtttgactggggcggtctcctcccaaagagtaacggaggagcacgaaggttagctaatcctggtcggacatcaggaggttagtgcaatggcataagctagcttgactgcgagcgtgacggcgcgagcaggtgcgaaagcaggtcatagtgatccggtggttctgaatggaagggccatcgctcaacggataaaaggtactccggggataacaggctgataccgcccaagagttcatatcgacggcggtgtttggcacctcgatgtcggctcatcacatcctggggctgaagtaggtcccaagggtatggctgttcgccatttaaagtggtacgcgagctgggtttagaacgtcgtgagacagttcggtccctatctgccgtgggcgctggagaattgaggggggctgctcctagtacgagaggaccggagtggacgcatcactggtgttcgggttgtcatgccaatggcattgcccggtagctaaatgcggaagagataagtgctgaaagcatctaagcacgaaacttgccccgagatgagttctccctgagactttaagtctcctgaaggaacgttaaagacgatgacgttgataggtcgggtgtgtaaacggacatggttttcgggagggcgcttaccactttgtgattcatgactggggtgaagtcgtaacaaggtaaccgtaggggaacctgcggttggatcatgtggttaccttaaagaagcgtactttgtagtgctcacacagattgtctgatagaaagtgaaaagcaaggcgtttacgcgttgggagtgaggctgaagagaataaggccgttcgctttctattaatgaaagctcaccctacacgaaaatatcacgcaacgcgtgataagcaattttcgtgtccccttcgtctagaggcccaggacaccgccctttcacggcggtaacaggggttcgaatcccctaggggacgccacttgctggtttgtgagtgaaagtcgccgaccttaatatctcaaaactcatcttcgggtgatgtttgagatatttgctctttaaaaatctggatcaagctgaaaattgaaacactgaacaacgagagttgttcgtgagtctctcaaattttcgcaacacgatgatgaatcgaaaggcggatgagagaagattttcagcctgatacagattaaatcagaacgcagaagcggtctgataaaacagaattgcctggcggcgatagcgcggtggtcccacctgaccccatgccgaactcagaagtgaaacgccgtagcgccgatggtagtgtggggtctccccatgtgagagtagggaactgccaggcatcaaataaaacgaaaggctcagtcgaaagactgggcctttcgttttatctgttgtttgtcggtgaacgctctcctgagtaggacaaatccgccgggagcggatttgaacgttgcgaagcaacggcccggagggtggcgggcaggacgcccgccataaactgccaggcatcaaattaagcagaaggccatcctgacggatggcctttttgcgtttctacaaactcttcctgtcgtcatatctacaagccggcgcgccgggaaatgtgcgcggaacccctatttgtttatttttctaaatacattcaaatatgtatccgctcatgagacaataaccctgataaatgcttcaataatattgaaaaaggaagagtatgagtattcaacatttccgtgtcgcccttattcccttttttgcggcattttgccttcctgtttttgctcacccagaaacgctggtgaaagtaaaagatgctgaagatcagttgggtgcacgagtgggttacatcgaactggatctcaacagcggtaagatccttgagagttttcgccccgaagaacgttttccaatgatgagcacttttaaagttctgctatgtggcgcggtattatcccgtgttgacgccgggcaagagcaactcggtcgccgcatacactattctcagaatgacttggttgagtactcaccagtcacagaaaagcatcttacggatggcatgacagtaagagaattatgcagtgctgcaataaccatgagtgataacactgcggccaacttacttctgacaacgatcggaggaccgaaggagctaaccgcttttttgcacaacatgggggatcatgtaactcgccttgatcgttgggaaccggagctgaatgaagccataccaaacgacgagcgtgacaccacgatgcctgcagcaatggcaacaacgttgcgcaaactattaactggcgaactacttactctagcttcccggcaacaattaatagactggatggaggcggataaagttgcaggaccacttctgcgctcggcccttccggctagctggtttattgctgataaatctggagccggtgagcgtgggtctcgcggtatcattgcagcactggggccagatggtaagccctcccgtatcgtagttatctacacgacggggagtcaggcaactatggatgaacgaaatagacagatcgctgagataggtgcctcactgattaagcattggtaactgcagaccaagtttactcatatatactttagattgatttaaaacttcatttttaatttaaaaggatctaggtgaagatcctttttgataatctcatgaccaaaatcccttaacgtgagttttcgttccactgagcgtcagaccccgtagaaaagatcaaaggatcttcttgagatcctttttttctgcgcgtaatctgctgcttgcaaacaaaaaaaccaccgctaccagcggtggtttgtttgccggatcaagagctaccaactctttttccgaaggtaactggcttcagcagagcgcagataccaaatactgtccttctagtgtagccgtagttaggccaccacttcaagaactctgtagcaccgcctacatacctcgctctgctaatcctgttaccagtggctgctgccagtggcgataagtcgtgtcttaccgggttggactcaagacgatagttaccggataaggcgcagcggtcgggctgaacggggggttcgtgcacacagcccagcttggagcgaacgacctacaccgaactgagatacctacagcgtgagctatgagaaagcgccacgcttcccgaagggagaaaggcggacaggtatccggtaagcggcagggtcggaacaggagagcgcacgagggagcttccagggggaaacgcctggtatctttatagtcctgtcgggtttcgccacctctgacttgagcgtcgatttttgtgatgctcgtcaggggggcggagcctatggaaaaacgccagcaacgcggcctttttacggttcctggccttttgctgg

SEQ ID NO: 349 - DNA, 7400 bp, Artificial
  Synthetic
agacttagggaccctgcggccgccattaattcctaatttttgttgacactctatcattgatagagttattttaccactccctatcagtgatagagaaaagtgaaatgaatagaccggccgctgagaaaaagcgaagcggcactgctctttaacaatttatcagacaatctgtgtgggcactcgaagatacggattcttaacgtcgcaagacgaaaaatgaataccaagtctcaagagtgaacacgtaattcattacgaagtttaattctttgagcgtcaaacttttaaattgaagagtttgatcatggctcagattgaacgctggcggcaggcctaacacatgcaagtcgagcggtagcacagagagcttgctctcgggtgacgagcggcggacgggtgagtaatgtctgggaaactgcctgatggagggggataactactggaaacggtagctaataccgcataacgtcgcaagaccaaagtgggggaccttcgggcctcatgccatcagatgtgcccagatgggattagctagtaggtggggtaacggctcacctaggcgacgatccctagctggtctgagaggatgaccagccacactggaactgagacacggtccagactcctacgggaggcagcagtggggaatattgcacaatgggcgcaagcctgatgcagccatgccgcgtgtgtgaagaaggccttcgggttgtaaagcactttcagcggggaggaaggcggtgaggttaataacctcatcgattgacgttacccgcagaagaagcaccggctaactccgtgccagcagccgcggtaatacggagggtgcaagcgttaatcggaattactgggcgtaaagcgcacgcaggcggtctgtcaagtcggatgtgaaatccccgggctcaacctgggaactgcattcgaaactggcaggctagagtcttgtagaggggggtagaattccaggtgtagcggtgaaatgcgtagagatctggaggaataccggtggcgaaggcggccccctggacaaagactgacgctcaggtgcgaaagcgtggggagcaaacaggattagataccctggtagtccacgccgtaaacgatgtcgatttggaggttgtgcccttgaggcgtggcttccggagctaacgcgttaaatcgaccgcctggggagtacggccgcaaggttaaaactcaaatgaattgacgggggcccgcacaagcggtggagcatgtggtttaattcgatgcaacgcgaagaaccttacctggtcttgacatccacagaactttccagagatggattggtgccttcgggaactgtgagacaggtgctgcatggctgtcgtcagctcgtgttgtgaaatgttgggttaagtcccgcaacgagcgcaacccttatcctttgttgccagcggttaggccgggaactcaaaggagactgccagtgataaactggaggaaggtggggatgacgtcaagtcatcatggcccttacgaccagggctacacacgtgctacaatggcatatacaaagagaagcgacctcgcgagagcaagcggacctcataaagtatgtcgtagtccggattggagtctgcaactcgactccatgaagtcggaatcgctagtaatcgtagatcagaatgctacggtgaatacgttcccgggccttgtacacaccgcccgtcacaccatgggagtgggttgcaaaagaagtaggtagcttaaccggtcaacagccgtttgagctaaccggtactaatgaaccgtgaggcttaaccttgagagggttgtgaggttaagcgactaagcgtacacggtggatgccctggcagtcagaggcgatgaaggacgtgctaatctgcgaaaagcgtcggtaaggtgatatgaaccgttatagccggcgatgtccgaatggggaaacccagtgcaattcgttgcactatcgttaactgaatacataggttaacgaggcgaaccgggggaactgaaacatctaagtaccccgaggaaaagaaatcaaccgagattcccccagtagcggcgagcgaacggggagcagcccagagtctgaatcagcttgtgtgttagtggaacggtctggaaagtccgacggtacagggtgatagtcccgtacaccaaaatgcacaggttgtgaactcgaagagtagggcgggacacgtggtatcctgtctgaatatggggggaccatcctccaaggctaaatactcctgactgaccgatagtgaaccagtaccgtgagggaaaggcgaaaagaaccccggcgaggggagtgaaaaagaacctgaaaccgtgtacgtacaagcagtgggagcaccttcgggtgtgactgcgtaccttttgtataatgggtcagcgacttatattctgtagcaaggttaaccgtataggggagccgcagggaaaccgagtcttaactgggcgttaagttgcagggtatagacccgaaacccggtgatctagccatgggcaggttgaaggttgggtaacactaactggaggaccgaaccgactaatgttgaaaaattagcggatgacttgtggctgggggtgaaaggccaatcaaaccgggagatagctggttctccccgaaagctatttaggtagcgcctcgtgaactcatcttcgggggtagagcactgtttcggctagggggtcatcccgacttaccaacccgatgcaaactacgaataccgaagaatgttatcacgggagacacacggcgggtgctaacgtccgtcgtgaagagggaaacaacccagaccgccagctaaggtcccaaagtcatggttaagtgggaaacgatgtgggaaggcacagacagccaggatgttggcttagaagcagccatcatttaaagaaagcgtaatagctcactggtcgagtcggcctgcgcggaagatgtaacggggctaaaccatgcaccgaagctgcggcagcgacactatgtgttgttgggtaggggagcgttctgtaagcctgcgaaggtgacctgtgagggttgctggaggtatcagaagtgcgaatgctgacataagtaacgataaagcgggtgaaaagcccgctcgccggaagaccaagggttcctgtccaacgttaatcggggcagggtgagtcgacccctaaggcgaggccgaaaggcgtagtcgatgggaaacaggttaatattcctgtacttggtgttactgcgaaggggggacggagaaggctatgttagccgggcgacggttgtcccggtttaagcatgtaggctgattgtccaggcaaatccggataatcaaggctgaggtgtgatgacgaggcactacggtgctgaagtaacaaatgccctgcttccaggaaaagcctctaagcatcaggtaacattaaatcgtaccccaaaccgacacaggtggtcaggtagagaataccaaggcgcttgagagaactcgggtgaaggaactaggcaaaatggtgccgtaacttcgggagaaggcacgctggtgtgtaggtgaagcccctgcgggtggagctgagaccagtcgaagataccagctggctgcaactgtttattaaaaacacagcactgtgcaaacacgaaagtggacgtatacggtgtgacgcctgcccggtgccggaaggttaattgatggggttatccgtaaggagaagctcttgatcgaagccccggtaaacggcggccgtaactataacggtcctaaggtagcgaaattccttgtcgggtaagttccgacctgcacgaatggcgtaatgatggccaggctgtctccacccgagactcagtgaaattgaactcgctgtgaagatgcagtgtacccgcggcaagacggaaagaccccgtgaacctttactatagcttgacactgaacattgagccttgatgtgtaggataggtgggaggctttgaagcgtggacgccagtctgcgtggagccaaccttgaaataccaccctttaatgtttgatgttctaacgttggccccttaccggggttgcggacagtgtctggtgggtagtttgactggggcggtctcctcccaaagcgtaacggaggagcacgaaggttagctaatcctggtcggacatcaggaggttagtgcaatggcataagctagcttgactgcgagcgtgacggcgcgagcaggtgcgaaagcaggtcatagtgatccggtggttctgaatggaagggccatcgctcaacggataaaaggtactccggggataacaggctgataccgcccaagagttcatatcgacggcggtgtttggcacctcgatgtcggctcatcacatcctggggctgaagtaggtcccaagggtatggctgttcgccatttaaagtggtacgcgagctgggtttagaacgtcgtgagacagttcggtccctatctgccgtgggcgctggagaattgaggggggctgctcctagtacgagaggaccggagtggacgcatcactggtgttcgggttgtcatgccaatggcactgcccggtagctaaatgcggaagagataagtgctgaaagcatctaagcacgaaacttgccccgagatgagttctccctgagactttaagtctcctgaaggaacgttaaagacgatgacgttgataggccgggtgtgtaaacggacatggttttcgggagggcgcttaccactttgtgattcatgactggggtgaagtcgtaacaaggtaaccgtaggggaacctgcggttggatcatgtggttaccttaaagaagcgtactttgtagtgctcacacagattgtctgatagaaagtgaaaagcaaggcgtttacgcgttgggagtgaggctgaagagaataaggccgttcgctttctattaatgaaagctcaccctacacgaaaatatcacgcaacgcgtgataagcaattttcgtgtccccttcgtctagaggcccaggacaccgccctttcacggcggtaacaggggttcgaatcccctaggggacgccacttgctggtttgtgagtgaaagtcgccgaccttaatatctcaaaactcatcttcgggtgatgtttgagatatttgctctttaaaaatctggatcaagctgaaaattgaaacactgaacaacgagagttgttcgtgagtctctcaaattttcgcaacacgatgatgaatcgaaaggcggatgagagaagattttcagcctgatacagattaaatcagaacgcagaagcggtctgataaaacagaatttgcctggcggcactagcgcggtggtcccacctgaccccatgccgaactcagaagtgaaacgccgtagcgccgatggtagtgtggggtctccccatgtgagagtagggaactgccaggcatcaaataaaacgaaaggctcagtcgaaagactgggcctttcgttttatctgttgtttgtcggtgaacgctctcctgagtaggacaaatccgccgggagcggatttgaacgttgcgaagcaacggcccggagggtggcgggcaggacgcccgccataaactgccaggcatcaaattaagcagaaggccatcctgacggatggcctttttgcgtttctacaaactcttcctgtcgtcatatctacaagccggcgcgccgggaaatgtgcgcggaacccctatttgtttatttttctaaatacattcaaatatgtatccgctcatgagacaataaccctgataaatgcttcaataatattgaaaaaggaagagtatgagtattcaacatttccgtgtcgcccttattcccttttttgcggcattttgccttcctgtttttgctcacccagaaacgctggtgaaagtaaaagatgctgaagatcagttgggtgcacgagtgggttacatcgaactggatctcaacagcggtaagatccttgagagttttcgccccgaagaacgttttccaatgatgagcacttttaaagttctgctatgtggcgcggtattatcccgtgttgacgccgggcaagagcaactcggtcgccgcatacactattctcagaatgacttggttgagtactcaccagtcacagaaaagcatcttacggatggcatgacagtaagagaattatgcagtgctgcaataaccatgagtgataacactgcggccaacttacttctgacaacgatcggaggaccgaaggagctaaccgcttttttgcacaacatgggggatcatgtaactcgccttgatcgttgggaaccggagctgaatgaagccataccaaacgacgagcgtgacaccacgatgcctgcagcaatggcaacaacgttgcgcaaactattaactggcgaactacttactctagcttcccggcaacaattaatagactggatggaggcggataaagttgcaggaccacttctgcgctcggcccttccggctagctggtttattgctgataaatctggagccggtgagcgtgggtctcgcggtatcattgcagcactggggccagatggtaagccctcccgtatcgtagttatctacacgacggggagtcaggcaactatggatgaacgaaatagacagatcgctgagataggtgcctcactgattaagcattggtaactgcagaccaagtttactcatatatactttagattgatttaaaacttcatttttaatttaaaaggatctaggtgaagatcctttttgataatctcatgaccaaaatcccttaacgtgagttttcgttccactgagcgtcagaccccgtagaaaagatcaaaggatcttcttgagatcctttttttctgcgcgtaatctgctgcttgcaaacaaaaaaaccaccgctaccagcggtggtttgtttgccggatcaagagctaccaactctttttccgaaggtaactggcttcagcagagcgcagataccaaatactgtccttctagtgtagccgtagttaggccaccacttcaagaactctgtagcaccgcctacatacctcgctctgctaatcctgttaccagtggctgctgccagtggcgataagtcgtgtcttaccgggttggactcaagacgatagttaccggataaggcgcagcggtcgggctgaacggggggttcgtgcacacagcccagcttggagcgaacgacctacaccgaactgagatacctacagcgtgagctatgagaaagcgccacgcttcccgaagggagaaaggcggacaggtatccggtaagcggcagggtcggaacaggagagcgcacgagggagcttccagggggaaacgcctggtatctttatagtcctgtcgggtttcgccacctctgacttgagcgtcgatttttgtgatgctcgtcaggggggcggagcctatggaaaaacgccagcaacgcggcctttttacggttcctggccttttgctgg

SEQ ID NO: 350 - DNA, 7508 bp, Artificial
  Synthetic
agacttagggaccctgcggccgccattaattcctaatttttgttgacactctatcattgatagagttattttaccactccctatcagtgatagagaaaagtgaaatgaatagaccggccgctgagaaaaagcgaagcggcactgctctttaacaatttatcagacaatctgtgtgggcactcgaagatacggattcttaacgtcgcaagacgaaaaatgaataccaagtctcaagagtgaacacgtaattcattacgaagtttaattctttgagcgtcaaacttttaaattgaagagtttgatcatggctcagattgaacgctggcggcaggcctaacacatgcaagtcgaacggtagcacagagagcttgctctcgggtgacgagtggcggacgggtgagtaatgtctgggaaactgcccgatggagggggataactactggaaacggtagctaataccgcataacgtcgcaagaccaaagagggggaccttcgggcctcttgccatcggatgtgcccagatgggattagcttgtaggtgaggtaacggctcacctaggcgacgatccctagctggtctgagaggatgaccagccacactggaactgagacacggtccagactcctacgggaggcagcagtggggaatattgcacaatgggcgcaagcctgatgcagccatgccgcgtgtatgaagaaggccttcgggttgtaaagtactttcagcggggaggaagggagtgaggttaataacctcattcattgacgttacccgcagaagaagcaccggctaactccgtgccagcagccgcggtaatacggagggtgcaagcgttaatcggaattactgggcgtaaagcgcacgcaggcggtctgtcaagtcggatgtgaaatccccgggctcaacctgggaactgcattcgaaactggcaggctggagtcttgtagaggggggtagaattccaggtgtagcggtgaaatgcgtagagatctggaggaataccggtggcgaaggcggccccctggacaaagactgacgctcaggtgcgaaagcgtggggagcaaacaggattagataccctggtagtccacgctgtaaacgatgtcgacttggaggttgttcccttgaggagtggcttccggagctaacgcgttaagtcgaccgcctggggagtacggccgcaaggttaaaactcaaatgaattgacgggggcccgcacaagcggtggagcatgtggtttaattcgatgcaacgcgaagaaccttacctactcttgacatccagagaacttagcagagatgctttggtgccttcgggaactctgagacaggtgctgcatggctgtcgtcagctcgtgttgtgaaatgttgggttaagtcccgcaacgagcgcaacccttatcctttgttgccagcgattcggtcgggaactcaaaggagactgccagtgataaactggaggaaggtggggatgacgtcaagtcatcatggcccttacgagtagggctacacacgtgctacaatggcatatacaaagagaagcgacctcgcgagagcaagcggacctcataaagtatgtcgtagtccggattggagtctgcaactcgactccatgaagtcggaatcgctagtaatcgtggatcagaatgccacggtgaatacgttcccgggccttgtacacaccgcccgtcacaccatgggagtgggttgcaaaagaagtaggtagcttaaccggtcaacagccgtttgagctaaccggtactaatgaaccgtgaggcttaaccttgagaggttaagcgactaagcgtacacggtggatgccctggcagtcagaggcgatgaaggacgtgctaatctgcgaaaagcgtcggtaaggtgatatgaaccgttacagccggcgatgtccgaatggggaaacccagtgcaattcgttgcactatcgtttgatgaatacatagtcaaacgaggcgaaccgggggaactgaaacatctaagtaccccgaggaaaagaaatcaaccgagattcccccagtagcggcgagcgaacggggagcagcccggagtctgaatcagcttgtgtgttagtggaagcgtctggaaagtcgcagggtacagggtgatactcccgtacactaaaacacacaggctgtgaactcgaagagtagggcgggacacgtggtatcctgtctgaatatggggggaccatcctccaaggctaaatactcctgactgaccgatagtgaaccagtaccgtgagggaaaggcgaaaagaaccccggcgaggggagtgaaaaagaacctgaaaccgtgtacgtacaagcagtaggagccccaccaccaaagcgtttcgctttgcgtggtgcgcaaaatgcgtaacgacagcatgatggacggttaacggagcgtcagcgacgttcaacctcaaaaatcaggcagtggagcgttttggggtggggtgactgcgtaccttttgtataatgggtcagcgacttatattctgtagcaaggttaaccgtataggggagccgcagggaaaccgagtcttaactgggcgttaagttgcagggtatagacccgaaacccggtgatctagccatgggcaggttgaaggttgggtaacactaactggaggaccgaaccgactaatgttgaaaaattagcggatgacttgtggctgggggtgaaaggccaatcaaaccgggagatagctggttctccccgaaagctatttaggtagcgcctcgtgaactcatcttcgggggtagagcactgtttcggctagggggtcatcccgacttaccaacccgatgcaaactacgaataccgaagaatgttatcacgggagacacacggcgggtgctaacgtccgtcgtgaagagggaaacaacccagaccgccagctaaggtcccaaagtcatggttaagtgggaaacgatgtgggaaggcccagacagccaggatgttggcttagaagcagccatcatttaaagaaagcgtaatagctcactggtcgagtcggcctgcgcggaagatgtaacggggctaaaccatgcaccgaagctgcggcagcgacactatgtgttgttgggtaggggagcgttctgtaagccgttgaaggtggcctgtgagggttgctggaggtatcagaagtgcgaatgctgacataagtaacgataatgcgggtgaaaaacccgcacgccggaagaccaagggttcctgtccaacgttaatcggggcagggtgagtcgacccctaaggcgaggccgaaaggcgtagtcgatgggaaacaggttaatattcctgtacttggtgttactgcgaaggggggacggagaaggctatgttggccgggcgacggttgtcccggtttaagcatgtaggcggatgttccaggtaaatccggaacgttactaacgctgaggtgtgatgacgaggcactacggtgctgaagtgacaaatgccctgcttccaggaaaagcctctaagcatcaggtaacatcaaatcgtaccccaaaccgacacaggtggtcaggtagagaataccaaggcgcttgagagaactcgggtgaaggaactaggcaaaatggtgccgtaacttcgggagaaggcacgctgatggtaagtgaagtgacttgctcacggagctgaaatcagtcgaagataccagctggctgcaactgtttattaaaaacacagcactgtgcaaacacgaaagtggacgtatacggtgtgacgcctgcccggtgccggaaggttaattgatggggttatcctcacggagaagctcttgatcgaagccccggtaaacggcggccgtaactataacggtcctaaggtagcgaaattccttgtcgggtaagttccgacctgcacgaatggcgtaatgatggccaggctgtctccacccgagactcagtgaaattgaactcgctgtgaagatgcagtgtacccgcggcaagacggaaagaccccgtgaacctttactatagcttgacactgaacactggtccttgatgtgtaggataggtgggaggctttgaagtgtggacgccagtctgcatggagccatccttgaaataccaccctttaatggctggtgttctaacgtgggcccgtgatccgggttgcggacagtgtctggtgggtagtttgactggggcggtctcctcctaaagagtaacggaggagcacgaaggtcagctaatcctggtcggacatcaggaggttagtgcaatggcataagctggcttgactgcgagcgtgacggcgcgagcaggtgcgaaagcaggtcatagtgatccggtggttctgaatggaagggccatcgctcaacggataaaaggtactccggggataacaggctgataccgcccaagagttcatatcgacggcggtgtttggcacctcgatgtcggctcatcacatcctggggctgaagtaggtcccaagggtatggctgttcgccatttaaagtggtacgcgagctgggtttagaacgtcgtgagacagttcggtccctatctgccgtgggcgctggagaattgaggggggctgctcctagtacgagaggaccggagtggacgcatcactggtgttcgggttgtcatgccaatggcattgcccggtagctaaatgcggaagagataagtgctgaaagcatctaagcacgaaacttgccccgagatgagttctccctgactccttgagagtcctgaaggaacgttgaagacgacgacgttgataggccgggtgtgtaaacggacatggttttcgggagggcgcttaccactttgtgattcatgactggggtgaagtcgtaacaaggtaaccgtaggggaacctgcggttggatcatgtggttaccttaaagaagcgtactttgtagtgctcacacagattgtctgatagaaagtgaaaagcaaggcgtttacgcgttgggagtgaggctgaagagaataaggccgttcgctttctattaatgaaagctcaccctacacgaaaatatcacgcaacgcgtgataagcaattttcgtgtccccttcgtctagaggcccaggacaccgccctttcacggcggtaacaggggttcgaatcccctaggggacgccacttgctggtttgtgagtgaaagtcgccgaccttaatatctcaaaactcatcttcgggtgatgtttgagatatttgctctttaaaaatctggatcaagctgaaaattgaaacactgaacaacgagagttgttcgtgagtctctcaaattttcgcaacacgatgatgaatcgaaaggcggatgagagaagattttcagcctgatacagattaaatcagaacgcagaagcggtctgataaaacagaattgcctggcggcactagcgcggtggtcccacctgaccccatgccgaactcagaagtgaaacgccgtagcgccgatggtagtgtggggtctccccatgtgagagtagggaactgccaggcatcaaataaaacgaaaggctcagtcgaaagactgggcctttcgttttatctgttgtttgtcggtgaacgctctcctgagtaggacaaatccgccgggagcggatttgaacgttgcgaagcaacggcccggagggtggcgggcaggacgcccgccataaactgccaggcatcaaattaagcagaaggccatcctgacggatggcctttttgcgtttctacaaactcttcctgtcgtcatatctacaagccggcgcgccgggaaatgtgcgcggaacccctatttgtttatttttctaaatacattcaaatatgtatccgctcatgagacaataaccctgataaatgcttcaataatattgaaaaaggaagagtatgagtattcaacatttccgtgtcgcccttattcccttttttgcggcattttgccttcctgtttttgctcacccagaaacgctggtgaaagtaaaagatgctgaagatcagttgggtgcacgagtgggttacatcgaactggatctcaacagcggtaagatccttgagagttttcgccccgaagaacgttttccaatgatgagcacttttaaagttctgctatgtggcgcggtattatcccgtgttgacgccgggcaagagcaactcggtcgccgcatacactattctcagaatgacttggttgagtactcaccagtcacagaaaagcatcttacggatggcatgacagtaagagaattatgcagtgctgcaataaccatgagtgataacactgcggccaacttacttctgacaacgatcggaggaccgaaggagctaaccgcttttttgcacaacatgggggatcatgtaactcgccttgatcgttgggaaccggagctgaatgaagccataccaaacgacgagcgtgacaccacgatgcctgcagcaatggcaacaacgttgcgcaaactattaactggcgaactacttactctagcttcccggcaacaattaatagactggatggaggcggataaagttgcaggaccacttctgcgctcggcccttccggctagctggtttattgctgataaatctggagccggtgagcgtgggtctcgcggtatcattgcagcactggggccagatggtaagccctcccgtatcgtagttatctacacgacggggagtcaggcaactatggatgaacgaaatagacagatcgctgagataggtgcctcactgattaagcattggtaactgcagaccaagtttactcatatatactttagattgatttaaaacttcatttttaatttaaaaggatctaggtgaagatcctttttgataatctcatgaccaaaatcccttaacgtgagttttcgttccactgagcgtcagaccccgtagaaaagatcaaaggatcttcttgagatcctttttttctgcgcgtaatctgctgcttgcaaacaaaaaaaccaccgctaccagcggtggtttgtttgccggatcaagagctaccaactctttttccgaaggtaactggcttcagcagagcgcagataccaaatactgtccttctagtgtagccgtagttaggccaccacttcaagaactctgtagcaccgcctacatacctcgctctgctaatcctgttaccagtggctgctgccagtggcgataagtcgtgtcttaccgggttggactcaagacgatagttaccggataaggcgcagcggtcgggctgaacggggggttcgtgcacacagcccagcttggagcgaacgacctacaccgaactgagatacctacagcgtgagctatgagaaagcgccacgcttcccgaagggagaaaggcggacaggtatccggtaagcggcagggtcggaacaggagagcgcacgagggagcttccagggggaaacgcctggtatctttatagtcctgtcgggtttcgccacctctgacttgagcgtcgatttttgtgatgctcgtcaggggggcggagcctatggaaaaacgccagcaacgcggcctttttacggttcctggccttttgctgg

SEQ ID NO: 351 - DNA, 7395 bp, Artificial
  Synthetic
agacttagggaccctgcggccgccattaattcctaatttttgttgacactctatcattgatagagttattttaccactccctatcagtgatagagaaaagtgaaatgaatagaccggccgctgagaaaaagcgaagcggcactgctctttaacaatttatcagacaatctgtgtgggcactcgaagatacggattcttaacgtcgcaagacgaaaaatgaataccaagtctcaagagtgaacacgtaattcattacgaagtttaattctttgagcgtcaaacttttaaattgaagagtttgatcatggctcagattgaacgctggcggcaggcctaacacatgcaagtcgaacggtaacaggaagcagcttgctgcttcgctgacgagtggcggacgggtgagtaatgtctgggaaactgcctgatggagggggataactactggaaacggtagctaataccgcataacgtcgcaagaccaaagagggggaccttcgggcctcttgccatcggatgtgcccagatgggattagctagtaggtggggtaacggctcacctaggcgacgatccctagctggtctgagaggatgaccagccacactggaactgagacacggtccagactcctacgggaggcagcagtggggaatattgcacaatgggcgcaagcctgatgcagccatgccgcgtgtatgaagaaggccttcgggttgtaaagtactttcagcggggaggaaggcgataaggttaataaccttgtcgattgacgttacccgcagaagaagcaccggctaactccgtgccagcagccgcggtaatacggagggtgcaagcgttaatcggaattactgggcgtaaagcgcacgcaggcggtctgtcaagtcggatgtgaaatccccgggctcaacctgggaactgcattcgaaactggcaggctagagtcttgtagaggggggtagaattccaggtgtagcggtgaaatgcgtagagatctggaggaataccggtggcgaaggcggccccctggacaaagactgacgctcaggtgcgaaagcgtggggagcaaacaggattagataccctggtagtccacgccgtaaacgatgtcgacttggaggttgtgcccttgaggcgtggcttccggagctaacgcgttaagtcgaccgcctggggagtacggccgcaaggttaaaactcaaatgaattgacgggggcccgcacaagcggtggagcatgtggtttaattcgatgcaacgcgaagaaccttacctactcttgacatccagagaacttagcagagatgctttggtgccttcgggaactctgagacaggtgctgcatggctgtcgtcagctcgtgttgtgaaatgttgggttaagtcccgcaacgagcgcaacccttatcctttgttgccagcggtccggccgggaactcaaaggagactgccagtgataaactggaggaaggtggggatgacgtcaagtcatcatggcccttacgagtagggctacacacgtgctacaatggcgcatacaaagagaagcgacctcgcgagagcaagcggacctcataaagtgcgtcgtagtccggattggagtctgcaactcgactccatgaagtcggaatcgctagtaatcgtggatcagaatgccacggtgaatacgttcccgggccttgtacacaccgcccgtcacaccatgggagtgggttgcaaaagaagtaggtagcttaaccggtcaacagccgtttgagctaaccgatactaatgaaccgtgaggcttaaccttgagaggttaagcgactaagcgtacacggtggatgccctggcagtcagaggcgatgaaggacgtgctaatctgcgaaaagcgccggcgaggtgatatgaacctttgacccggcgatgtccgaatggggaaacccagtgcaatccgttgcactatcgttaactgaatacataggttaacgaggcgaaccgggggaactgaaacatctaagtaccccgaggaaaagaaatcaaccgagattcccccagtagcggcgagcgaacggggagcagcccggagtctgaatcagcttgtgtgttagtggaacggtctggaaagtccgacggtacagggtgatagtcccgtacacgaaagcacacttgctgtgaactcgaagagtagggcgggacacgtggtatcctgtctgaatatggggggaccatcctccaaggctaaatactcctgactgaccgatagtgaaccagtaccgtgagggaaaggcgaaaagaaccccggcgaggggagtgaaaaagaacctgaaaccgtgtacgtacaagcagtgggagcctctttatggggtgactgcgtaccttttgtataatgggtcagcgacttatattctgtagcaaggttaaccgtataggggagccgaagggaaaccgagtcttaactgggcgttaagttgcagggtatagacccgaaacccggtgatctagccatgggcaggttgaaggttgggtaacactaactggaggaccgaaccgactaatgttgaaaaattagcggatgacctgtggctgggggtgaaaggccaatcaaaccgggagatagctggttctccccgaaagctatttaggtagcgcctcgtgaactcatcttcgggggtagagcactgtttcggctagggggccatcccggcttaccaacccgatgcaaactacgaataccgaagaatgttatcacgggagacacacggcgggtgctaacgtccgtcgtgaagagggaaacaacccagaccgccagctaaggtcccaaagtcatggttaagtgggaaacgatgtgggaaggcacagacagccaggatgttggcttagaagcagccatcatttaaagaaagcgtaatagctcactggtcgagtcggcctgcgcggaagatgtaacggggctaaaccatgcaccgaagctgcggcagcgacactatgtgttgttgggtaggggagcgttctgtaagccgttgaaggtgtgctgtgaggcatgctggaggtatcagaagtgcgaatgctgacataagtaacgataaagcgggtgaaaagcccgctcgccggaagaccaagggttcctgtccaacgttaatcggggcagggtgagtcgacccctaaggcgaggccgaaaggcgtagtcgatgggaaacaggttaatattcctgtacttggtgttactgcgaaggggggacggagaaggctatgtcagccgggcgacggttgtcccggtttaagcatgtaggcggaggttccaggtaaatccggtaccttttaacgctgaggtgtgatgacgaggcactacggtgctgaagtgataaatgccctgcttccaggaaaagcctctaagcatcaggtaacacgaaatcgtaccccaaaccgacacaggtggtcaggtagagaataccaaggcgcttgagagaactcgggtgaaggaactaggcaaaatggtgccgtaacttcgggagaaggcacgctgatgtgtaggtgaagcccctgcgggtggagctgaaatcagtcgaagataccagctggctgcaactgtttattaaaaacacagcactgtgcaaacacgaaagtggacgtatacggtgtgacgcctgcccggtgccggaaggttaattgatggggttagcggcaacgcgaagctcttgatcgaagccccggtaaacggcggccgtaactataacggtcctaaggtagcgaaattccttgtcgggtaagttccgacctgcacgaatggcgtaatgatggccaggctgtctccacccgagactcagtgaaattgaactcgctgtgaagatgcagtgtacccgcggcaagacggaaagaccccgtgaacctttactatagcttgacactgaacactggtccttgatgtgtaggataggtgggaggctttgaagcgtggacgccagtctgcgtggagccaaccttgaaataccaccctttaatggctggtgttctaacgtagacccgtaatccgggttgcggacagtgtctggtgggtagtttgactggggcggtctcctcccaaagagtaacggaggagcacgaaggttggctaatcctggtcggacatcaggaggttagtgcaatggcataagccagcttgactgcgagcgtgacggcgcgagcaggtgcgaaagcaggtcatagtgatccggtggttctgaatggaagggccatcgctcaacggataaaaggtactccggggataacaggctgataccgcccaagagttcatatcgacggcggtgtttggcacctcgatgtcggctcatcacatcctggggctgaagtaggtcccaagggtatggctgttcgccatttaaagtggtacgcgagctgggtttagaacgtcgtgagacagttcggtccctatctgccgtgggcgctggagaattgaggggggctgctcctagtacgagaggaccggagtggacgcatcactggtgttcgggttgtcatgccaatggcactgcccggtagctaaatgcggaagagataagtgctgaaagcatctaagcacgaaacttgccccgagatgagttctccctgagaccttgagtctcctgaaggaacgttgaagacgacgacgttgataggtcgggtgtgtaaacggacatggttttcgggagggcgcttaccactttgtgattcatgactggggtgaagtcgtaacaaggtaaccgtaggggaacctgcggttggatcatgtggttaccttaaagaagcgtactttgtagtgctcacacagattgtctgatagaaagtgaaaagcaaggcgtttacgcgttgggagtgaggctgaagagaataaggccgttcgctttctattaatgaaagctcaccctacacgaaaatatcacgcaacgcgtgataagcaattttcgtgtccccttcgtctagaggcccaggacaccgccctttcacggcggtaacaggggttcgaatcccctaggggacgccacttgctggtttgtgagtgaaagtcgccgaccttaatatctcaaaactcatcttcgggtgatgtttgagatatttgctctttaaaaatctggatcaagctgaaaattgaaacactgaacaacgagagttgttcgtgagtctctcaaattttcgcaacacgatgatgaatcgaaaggcggatgagagaagattttcagcctgatacagattaaatcagaacgcagaagcggtctgataaaacagaatttgcctggcggctttagcgcggtggtcccacctgaccccatgccgaactcagaagtgaaacgccgtagcgccgatggtagtgtggggtctccccatgtgagagtagggaactgccaggcatcaaataaaacgaaaggctcagtcgaaagactgggcctttcgttttatctgttgtttgtcggtgaacgctctcctgagtaggacaaatccgccgggagcggatttgaacgttgcgaagcaacggcccggagggtggcgggcaggacgcccgccataaactgccaggcatcaaattaagcagaaggccatcctgacggatggcctttttgcgtttctacaaactcttcctgtcgtcatatctacaagccggcgcgccgggaaatgtgcgcggaacccctatttgtttatttttctaaatacattcaaatatgtatccgctcatgagacaataaccctgataaatgcttcaataatattgaaaaaggaagagtatgagtattcaacatttccgtgtcgcccttattcccttttttgcggcattttgccttcctgtttttgctcacccagaaacgctggtgaaagtaaaagatgctgaagatcagttgggtgcacgagtgggttacatcgaactggatctcaacagcggtaagatccttgagagttttcgccccgaagaacgttttccaatgatgagcacttttaaagttctgctatgtggcgcggtattatcccgtgttgacgccgggcaagagcaactcggtcgccgcatacactattctcagaatgacttggttgagtactcaccagtcacagaaaagcatcttacggatggcatgacagtaagagaattatgcagtgctgcaataaccatgagtgataacactgcggccaacttacttctgacaacgatcggaggaccgaaggagctaaccgcttttttgcacaacatgggggatcatgtaactcgccttgatcgttgggaaccggagctgaatgaagccataccaaacgacgagcgtgacaccacgatgcctgcagcaatggcaacaacgttgcgcaaactattaactggcgaactacttactctagcttcccggcaacaattaatagactggatggaggcggataaagttgcaggaccacttctgcgctcggcccttccggctagctggtttattgctgataaatctggagccggtgagcgtgggtctcgcggtatcattgcagcactggggccagatggtaagccctcccgtatcgtagttatctacacgacggggagtcaggcaactatggatgaacgaaatagacagatcgctgagataggtgcctcactgattaagcattggtaactgcagaccaagtttactcatatatactttagattgatttaaaacttcatttttaatttaaaaggatctaggtgaagatcctttttgataatctcatgaccaaaatcccttaacgtgagttttcgttccactgagcgtcagaccccgtagaaaagatcaaaggatcttcttgagatcctttttttctgcgcgtaatctgctgcttgcaaacaaaaaaaccaccgctaccagcggtggtttgtttgccggatcaagagctaccaactctttttccgaaggtaactggcttcagcagagcgcagataccaaatactgtccttctagtgtagccgtagttaggccaccacttcaagaactctgtagcaccgcctacatacctcgctctgctaatcctgttaccagtggctgctgccagtggcgataagtcgtgtcttaccgggttggactcaagacgatagttaccggataaggcgcagcggtcgggctgaacggggggttcgtgcacacagcccagcttggagcgaacgacctacaccgaactgagatacctacagcgtgagctatgagaaagcgccacgcttcccgaagggagaaaggcggacaggtatccggtaagcggcagggtcggaacaggagagcgcacgagggagcttccagggggaaacgcctggtatctttatagtcctgtcgggtttcgccacctctgacttgagcgtcgatttttgtgatgctcgtcaggggggcggagcctatggaaaaacgccagcaacgcggcctttttacggttcctggccttttgctgg

SEQ ID NO: 352 - DNA, 7412 bp, Artificial
  Synthetic
agacttagggaccctgcggccgccattaattcctaatttttgttgacactctatcattgatagagttattttaccactccctatcagtgatagagaaaagtgaaatgaatagaccggccgctgagaaaaagcgaagcggcactgctctttaacaatttatcagacaatctgtgtgggcactcgaagatacggattcttaacgtcgcaagacgaaaaatgaataccaagtctcaagagtgaacacgtaattcattacgaagtttaattctttgagcgtcaaactttttaattgaagagtttgatcatggctcagattgaacgctggcggcaggcttaacacatgcaagtcgagcggtagcacaggggagcttgctccctgggtgacgagcggcggacgggtgagtaatgtctgggaaactgcctgatggagggggataactactggaaacggtagctaataccgcataacgtcgcaagaccaaagagggggaccttcgggcctcttgccatcagatgtgcccagatgggattagctagtaggtggggtaatggctcacctaggcgacgatccctagctggtctgagaggatgaccagccacactggaactgagacacggtccagactcctacgggaggcagcagtggggaatattgcacaatgggcgcaagcctgatgcagccatgccgcgtgtgtgaagaaggccttcgggttgtaaagcactttcagcgaggaggaaggtggtgagcttaatacgctcatcaattgacgttactcgcagaagaagcaccggctaactccgtgccagcagccgcggtaatacggagggtgcaagcgttaatcggaattactgggcgtaaagcgcacgcaggcggtttgttaagtcagatgtgaaatccccgggctcaacctgggaactgcatttgaaactggcaagctagagtctcgtagaggggggtagaattccaggtgtagcggtgaaatgcgtagagatctggaggaataccggtggcgaaggcggccccctggacgaagactgacgctcaggtgcgaaagcgtggggagcaaacaggattagataccctggtagtccacgctgtaaacgatgtcgatttggaggttgtgcccttgaggcgtggcttccggagctaacgcgttaaatcgaccgcctggggagtacggccgcaaggttaaaactcaaatgaattgacgggggcccgcacaagcggtggagcatgtggtttaattcgatgcaacgcgaagaaccttacctactcttgacatccagagaacttagcagagatgctttggtgccttcgggaactctgagacaggtgctgcatggctgtcgtcagctcgtgttgtgaaatgttgggttaagtcccgcaacgagcgcaacccttatcctttgttgccagcggttcggccgggaactcaaaggagactgccagtgataaactggaggaaggtggggatgacgtcaagtcatcatggcccttacgagtagggctacacacgtgctacaatggcatatacaaagagaagcgacctcgcgagagcaagcggacctcataaagtatgtcgtagtccggattggagtctgcaactcgactccatgaagtcggaatcgctagtaatcgtagatcagaatgctacggtgaatacgttcccgggccttgtacacaccgcccgtcacaccatgggagtgggttgcaaaagaagtaggtagcttaaccggtcaacagccgtttgagctaaccagtactaatgatccgtgaggcttaaccttgagaggttaagtgactaagcgtacacggtggatgcctaggcagtcagaggcgatgaagggcgtgctaatctgcgaaaagcgtcggtaaggtgatatgaaccgttataaccggcgatacccgaatggggaaacccagtgtgtttcgacacactatcatgtcatgaatacatagtggcatgaggcgaaccgggggaactgaaacatctaagtaccccgaggaaaagaaatcaaccgagattcccccagtagcggcgagcgaacggggaggagcccagaacctgaatcggcttgtgtgttagtggaagcgtctggaaagtcgcgcagcaaagggtgatagccccgtacactaaaatgcacaggtcgtgagttcgatgagtagggcgggacacgtgacatcctgtctgaatatggggggaccatcctccaaggctaaatactcctgactgaccgatagtgaaccagtaccgtgagggaaaggcgaaaagaaccccggcgaggggagtgaaatagaacctgaaaccgtgtacgtacaagcagtgggagcaccttcgtggtgtgactgcgtaccttttgtataatgggtcagcgacttatattttgtagcaaggttaaccgtataggggagccgtagggaaaccgagtcttaactgggcgaatagttgcaaggtatagacccgaaacccggtgatctagccatgggcaggttgaaggttgggtaacactaactggaggaccgaaccgactaatgttgaaaaattagcggatgacttgtggctgggggtgaaaggccaatcaaaccgggagatagctggttctccccgaaagctatttaggtagcgcctcgtgaactcatcttcgggggtagagcactgtttcggctagggggccatcccggcttaccaaaccgatgcaaactccgaataccgaagaatgttatcacgggagacacacggcgggtgctaacgtccgtcgtgaagagggaaacaacccagaccgccagctaaggtcccaaagtcatggttaagtgggaaacgatgtgggaaggcatagacagccaggatgttggcttagaagcagccatcatttaaagaaagcgtaatagctcactggtcgagtcggcctgcgcggaagatgtaacggggctaaaccatgcaccgaagctgcggcagcgacgcttaggcgttgttgggtaggggagcgttctgtaagccgttgaaggtggcctgtgagggttgctggaggtatcagaagtgcgaatgctgacataagtaacgataaagcgggtgaaaagcccgctcgccggaagaccaagggttcctgtccaacgttaatcggggcagggtgagtcgacccctaaggcgaggctgaaaagcgtagtcgatgggaaacaggttaatattcctgtacttggtgttactgcgaaggggggacggagaaggctaggctagccgggcgacggttgtcccggtttaagcgtgtagggggtgtgacctggtaaatccggttgcatattaaccctgaggcgtgatgacgatgcactacggtgcagaagtagttgatgccctgcttccaggaaaatcctctaagcatcaggtaacattaaatcgtaccccaaaccgacacaggtggtcaggtagagaataccaaggcgcttgagagaactcgggtgaaggaactaggcaaaatggtgccgtaacttcgggagaaggcacgctggcatgtaggtgaagtccctcgcggatggagctgaagccagtcgaagataccagctggctgcaactgtttaataaaaacacagcactgtgcaaacacgaaagtggacgtatacggtgtgacgcctgcccggtgctggaaggttaattgatggggtcagccgcaaggcgaagctcttgatcgaagccccagtaaacggcggccgtaactataacggtcctaaggtagcgaaattccttgtcgggtaagttccgacctgcacgaatggcgtaatgatggccaggctgtctccacccgagactcagtgaaattgaactcgctgtgaagatgcagtgtacccgcggcaagacggaaagaccccgtgaacctttactatagcttgacactgaacattgagccttgatgtgtaggataggtgggaggctttgaagcgtggacgccagtctgcgtggagccatccttgaaataccaccctttaatgtttgatgttctaactcggccccgtaatccggggtgaggacagtgtctggtgggtagtttgactggggcggtctcctcccaaagagtaacggaggagcacgaaggttagctaatcacggtcggacatcgtgaggttagtgcaaaggcataagctagcttgactgcgagagtgacggctcgagcaggtacgaaagtaggtcttagtgatccggtggttctgaatggaagggccatcgctcaacggataaaaggtactccggggataacaggctgataccgcccaagagttcatatcgacggcggtgtttggcacctcgatgtcggctcatcacatcctggggctgaagtaggtcccaagggtatggctgttcgccatttaaagtggtacgcgagctgggtttagaacgtcgtgagacagttcggtccctatctgccgtgggcgttggaagattgagaggggttgctcctagtacgagaggaccggagtgaacgcaccactggtgttcgggttgtcatgccaatggcattgcccggtagctaagtgcggaaaagataagcgctgaaagcatctaagcgcgaaacttgcctcaagatgagtcttccctgggcctttaaggtccctgaaggaacgtttaagactaagacgttgataggctgggtgtgtaagtgcagcgatgcatacggacatggttttcgggagggcgcttaccactttgtgattcatgactggggtgaagtcgtaacaaggtaaccgtaggggaacctgcggttggatcatgtggttaccttaaagaagcgtactttgtagtgctcacacagattgtctgatagaaagtgaaaagcaaggcgtttacgcgttgggagtgaggctgaagagaataaggccgttcgctttctattaatgaaagctcaccctacacgaaaatatcacgcaacgcgtgataagcaattttcgtgtccccttcgtctagaggcccaggacaccgccctttcacggcggtaacaggggttcgaatcccctaggggacgccacttgctggtttgtgagtgaaagtcgccgaccttaatatctcaaaactcatcttcgggtgatgtttgagatatttgctctttaaaaatctggatcaagctgaaaattgaaacactgaacaacgagagttgttcgtgagtctctcaaattttcgcaacacgatgatgaatcgaaaggcggatgagagaagattttcagcctgatacagattaaatcagaacgcagaagcggtctgataaaacagaattgcctggcggcaatagcgcggtggtcccacctgaccccatgccgaactcagaagtgaaacgccgtagcgccgatggtagtgtggggtctccccatgcgagagtaggacactgccaggcatcaaataaaacgaaaggctcagtcgaaagactgggcctttcgttttatctgttgtttgtcggtgaacgctctcctgagtaggacaaatccgccgggagcggatttgaacgttgcgaagcaacggcccggagggtggcgggcaggacgcccgccataaactgccaggcatcaaattaagcagaaggccatcctgacggatggcctttttgcgtttctacaaactcttcctgtcgtcatatctacaagccggcgcgccgggaaatgtgcgcggaacccctatttgtttatttttctaaatacattcaaatatgtatccgctcatgagacaataaccctgataaatgcttcaataatattgaaaaaggaagagtatgagtattcaacatttccgtgtcgcccttattcccttttttgcggcattttgccttcctgtttttgctcacccagaaacgctggtgaaagtaaaagatgctgaagatcagttgggtgcacgagtgggttacatcgaactggatctcaacagcggtaagatccttgagagttttcgccccgaagaacgttttccaatgatgagcacttttaaagttctgctatgtggcgcggtattatcccgtgttgacgccgggcaagagcaactcggtcgccgcatacactattctcagaatgacttggttgagtactcaccagtcacagaaaagcatcttacggatggcatgacagtaagagaattatgcagtgctgcaataaccatgagtgataacactgcggccaacttacttctgacaacgatcggaggaccgaaggagctaaccgcttttttgcacaacatgggggatcatgtaactcgccttgatcgttgggaaccggagctgaatgaagccataccaaacgacgagcgtgacaccacgatgcctgcagcaatggcaacaacgttgcgcaaactattaactggcgaactacttactctagcttcccggcaacaattaatagactggatggaggcggataaagttgcaggaccacttctgcgctcggcccttccggctagctggtttattgctgataaatctggagccggtgagcgtgggtctcgcggtatcattgcagcactggggccagatggtaagccctcccgtatcgtagttatctacacgacggggagtcaggcaactatggatgaacgaaatagacagatcgctgagataggtgcctcactgattaagcattggtaactgcagaccaagtttactcatatatactttagattgatttaaaacttcatttttaatttaaaaggatctaggtgaagatcctttttgataatctcatgaccaaaatcccttaacgtgagttttcgttccactgagcgtcagaccccgtagaaaagatcaaaggatcttcttgagatcctttttttctgcgcgtaatctgctgcttgcaaacaaaaaaaccaccgctaccagcggtggtttgtttgccggatcaagagctaccaactctttttccgaaggtaactggcttcagcagagcgcagataccaaatactgtccttctagtgtagccgtagttaggccaccacttcaagaactctgtagcaccgcctacatacctcgctctgctaatcctgttaccagtggctgctgccagtggcgataagtcgtgtcttaccgggttggactcaagacgatagttaccggataaggcgcagcggtcgggctgaacggggggttcgtgcacacagcccagcttggagcgaacgacctacaccgaactgagatacctacagcgtgagctatgagaaagcgccacgcttcccgaagggagaaaggcggacaggtatccggtaagcggcagggtcggaacaggagagcgcacgagggagcttccagggggaaacgcctggtatctttatagtcctgtcgggtttcgccacctctgacttgagcgtcgatttttgtgatgctcgtcaggggggcggagcctatggaaaaacgccagcaacgcggcctttttacggttcctggccttttgctgg

SEQ ID NO: 353 - DNA, 7681 bp, Artificial
  Synthetic
agacttagggaccctgcggccgccattaattcctaatttttgttgacactctatcattgatagagttattttaccactccctatcagtgatagagaaaagtgaaatgaatagaccggccgctgagaaaaagcgaagcggcactgctctttaacaatttatcagacaatctgtgtgggcactcgaagatacggattcttaacgtcgcaagacgaaaaatgaataccaagtctcaagagtgaacacgtaattcattacgaagtttaattctttgagcgtcaaactttttaattgaagagtttgatcatggctcagattgaacgctggcggcaggcctaacacatgcaagtcgagcggtaacaggggaagcttgcttctcgctgacgagcggcggacgggtgagtaatgtatggggatctgcccgatagagggggataactactggaaacggtggctaataccgcataatctcttaggagcaaagcaggggaccttcgggccttgcgctgtcggatgaacccatatgggattagctagtaggtaaggtaatggcttacctaggcgacgatccctagctggtctgagaggatgatcagccacactgggactgagacacggcccagactcctacgggaggcagcagtggggaatattgcacaatgggcgcaagcctgatgcagccatgccgcgtgtatgaagaaggccctagggttgtaaagtactttcagtcgggaggaaggcgttgatgttaataccatcaacgattgacgttaccgacagaagaagcaccggctaactccgtgccagcagccgcggtaatacggagggtgcaagcgttaatcggaattactgggcgtaaagcgcacgcaggcggttaattaagttagatgtgaaatccccgggcttaacctgggaatggcatctaagactggttagctagagtcttgtagaggggggtagaattccatgtgtagcggtgaaatgcgtagagatgtggaggaataccggtggcgaaggcggccccctggacaaagactgacgctcaggtgcgaaagcgtggggagcaaacaggattagataccctggtagtccacgctgtaaacgatgtcgatttggaggttgttccctagaggagtggcttccggagctaacgcgttaaatcgaccgcctggggagtacggccgcaaggttaaaactcaaatgaattgacgggggcccgcacaagcggtggagcatgtggtttaattcgatgcaacgcgaagaaccttacctactcttgacatccagagaatttagcagagatgctttagtgccttcgggaactctgagacaggtgctgcatggctgtcgtcagctcgtgttgtgaaatgttgggttaagtcccgcaacgagcgcaacccttatcctttgttgccagcgattcggtcgggaactcaaaggagactgccggtgataaaccggaggaaggtggggatgacgtcaagtcatcatggcccttacgagtagggctacacacgtgctacaatggcgtatacaaagagaagcgacctcgcgagagcaagcggaactcataaagtacgtcgtagtccggattggagtctgcaactcgactccatgaagtcggaatcgctagtaatcgtagatcagaatgctacggtgaatacgttcccgggccttgtacacaccgcccgtcacaccatgggagtgggttgcaaaagaagtaggtagcttaaccggtcaacagccgtttgagctaaccagtactaatgaaccgtgaggcttaacctggagaggttaagcgaataagcgtacacggtggatgcctaggcaatcagaggcgatgaaggacgtgctaatctgcgaaaagcgtcggtaaggtgatatgaaccgttatacccgacgatatccgaatggggaaacccagtatccaatggatactatcattaactgaatccataggttaatgaggcgaaccgggagaactgaaacatctcagtaccccgaggaaaagaaatcaaccgagattcccctagtagcggcgagcgaacggggagcagcccagagtcttaatcaatagcagtgtcaggagaacggtctggaaagtccggcagtaaagggtgatagccccgtatctgaagatgctgttgttgtgaactcgacgagtagggcgggacacgtgttatcctgtctgaatatggggggaccatcctccaaggctaaatactcctgattgaccgatagtgaaccagtaccgtgagggaaaggcgaaaagaaccccggcgaggggagtgaaaaagaacctgaaaccgtgtacgtacaagcagtaggagccccatcactcaagtgcctcgcactgagtgatgcaataacatcaccgaaaatagcgccgaatttgctaacaaggttggtcgattttttcaagccgtcgcgcagtgtacctagaagtacacgagcaacggaagttaaaaaatcgggcaagattgaacgcaaaggcaagcgggacatttgaggatggggtgactgcgtaccttttgtataatgggtcagcgacttatattctgtagcaaggttaaccgtataggggagccgtagggaaaccgagtcttaactgggcgaatgagttgcagggtatagacccgaaacccggtgatctatccatgggcaggttgaaggttgggtaacactaactggaggaccgaaccgactaatgttgaaaaattagcggatgacttgtggatgggggtgaaaggccaatcaaaccgggagatagctggttctccccgaaagctatttaggtagcgcctcgtgaactcatcttcgggggtagagcactgtttcgactagggggtcatcccgacttaccaactcgatgcaaactgcgaataccgaagaatgttatcacgggagacacacggcgggtgctaacgtccgtcgtgaagagggaaacaacccagaccgccagctaaggtcccaaagtcatggttaagtgggaaacgaagtgggaaggctcagacagccaggatgttggcttagaagcagccatcatttaaagaaagcgtaatagctcactggtcgagtcggcccgcgcggaagatgtaacggggctaaaccatgcaccgaagctgcggcagcgaacgtatcacttaaatttgtttgagtgaataacgattgacggaacgaagtgacgtcaatgcgttaatgaaagtcgaggcgaaagcacgacaaagcgaatttaaggatacgttcgttgggtaggggagcgttctgtaagcctgcgaaggtgtactgtgaggtatgctggaggtatcagaagtgcgaatgctgacataagtaacgataatgcgggtgaaaaacccgcacgccggaagaccaagggttcctgtccaacgttaatcggggcagggtgagtcgacccctaaggcgaggctgaaaagcgtagtcgatgggaaacgggttaatattcccgtactggtggtaactgcgatgggggaacggagaaggctaggttgtccgggcgacggtcgtcccggttcaagcaggtaggcagagtgattaggcaaatccggtcacttaatgctgagatgtgatgacgaaccaccaaggtggtgaagcaattgatgccccgcttccaggaaaagcctctaagcttcaggttaccaacaatcgtaccccaaaccgacacaggtggtcaggtagagaatactcaggcgcttgagagaactcgggtgaaggaactaggcaaaatggtgccgtaacttcgggagaaggcacgctggcggtaggtaaagtcccttgcggacggcgctgaagccagtcgaagataccagctggctgcaactgtttattaaaaacacagcactgtgcaaacacgaaagtggacgtatacggtgtgacgcctgcccggtgctggaaggttaattgatggggtcagccgtaaggcgaagctcctgatcgaagccccagtaaacggcggccgtaactataacggtcctaaggtagcgaaattccttgtcgggtaagttccgacctgcacgaatggcgtaatgatggccaggctgtctccacccgagactcagtgaaattgaactcgctgtgaagatgcagtgtacccgcggcaagacggaaagaccccgtgaacctttactatagcttgacactgaacattgagccttgatgtgtaggataggtgggaggctttgaagtgtggacgccagtctgcatggagccaaccttgaaataccaccctttaacgtttgatgttctaacctaggcccataaactgggtcggggaccgtgtctggtgggtagtttgactggggcggtctcctcctaaagagtaacggaggagcacgaaggttggctaagcatggtcggacatcatgcggttagtgcaaaggcataagccagcttgactgcgagagtgacggctcgagcaggtacgaaagtaggtcttagtgatccggtggttctgaatggaagggccatcgctcaacggataaaaggtactccggggataacaggctgataccgcccaagagttcatatcgacggcggtgtttggcacctcgatgtcggctcatcacatcctggggctgaagtaggtcccaagggtatggctgttcgccatttaaagtggtacgcgagctgggtttagaacgtcgtgagacagttcggtccctatctgccgtgggcgttggaagattgagaggggttgctcctagtacgagaggaccggagtgaacgcaccactggtgttcgggttgtcatgccaatggcattgcccggtagctaagtgcggaagagataaccgctgaaagcatctaagcgggaaacttgcctcgagatgagtcttccctgtcgctttaagcgacctaaaggaacgtttaagactaagacgttgataggctgggtgtgtaagcgtagcgatacgtacggacatggttttcgggagggcgcttaccactttgtgatccatgactggggtgaagtcgtaacaaggtaaccgtaggggaacctgcggttggatcatgtggttaccttaaagaagcgtactttgtagtgctcacacagattgtctgatagaaagtgaaaagcaaggcgtttacgcgttgggagtgaggctgaagagaataaggccgttcgctttctattaatgaaagctcaccctacacgaaaatatcacgcaacgcgtgataagcaattttcgtgtccccttcgtctagaggcccaggacaccgccctttcacggcggtaacaggggttcgaatcccctaggggacgccacttgctggtttgtgagtgaaagtcgccgaccttaatatctcaaaactcatcttcgggtgatgtttgagatatttgctctttaaaaatctggatcaagctgaaaattgaaacactgaacaacgagagttgttcgtgagtctctcaaattttcgcaacacgatgatgaatcgaaaggcggatgagagaagattttcagcctgatacagattaaatcagaacgcagaagcggtctgataaaacagaatttgcttggcggccatagcgcggtggtcccacctgatcccatgccgaactcagaagtgaaacgccgtagcgccgatggtagtgtggggtctccccatgtgagagtagggaactgccaagcatcaaataaaacgaaaggctcagtcgaaagactgggcctttcgttttatctgttgtttgtcggtgaacgctctcctgagtaggacaaatccgccgggagcggatttgaacgttgcgaagcaacggcccggagggtggcgggcaggacgcccgccataaactgccaggcatcaaattaagcagaaggccatcctgacggatggcctttttgcgtttctacaaactcttcctgtcgtcatatctacaagccggcgcgccgggaaatgtgcgcggaacccctatttgtttatttttctaaatacattcaaatatgtatccgctcatgagacaataaccctgataaatgcttcaataatattgaaaaaggaagagtatgagtattcaacatttccgtgtcgcccttattcccttttttgcggcattttgccttcctgtttttgctcacccagaaacgctggtgaaagtaaaagatgctgaagatcagttgggtgcacgagtgggttacatcgaactggatctcaacagcggtaagatccttgagagttttcgccccgaagaacgttttccaatgatgagcacttttaaagttctgctatgtggcgcggtattatcccgtgttgacgccgggcaagagcaactcggtcgccgcatacactattctcagaatgacttggttgagtactcaccagtcacagaaaagcatcttacggatggcatgacagtaagagaattatgcagtgctgcaataaccatgagtgataacactgcggccaacttacttctgacaacgatcggaggaccgaaggagctaaccgcttttttgcacaacatgggggatcatgtaactcgccttgatcgttgggaaccggagctgaatgaagccataccaaacgacgagcgtgacaccacgatgcctgcagcaatggcaacaacgttgcgcaaactattaactggcgaactacttactctagcttcccggcaacaattaatagactggatggaggcggataaagttgcaggaccacttctgcgctcggcccttccggctagctggtttattgctgataaatctggagccggtgagcgtgggtctcgcggtatcattgcagcactggggccagatggtaagccctcccgtatcgtagttatctacacgacggggagtcaggcaactatggatgaacgaaatagacagatcgctgagataggtgcctcactgattaagcattggtaactgcagaccaagtttactcatatatactttagattgatttaaaacttcatttttaatttaaaaggatctaggtgaagatcctttttgataatctcatgaccaaaatcccttaacgtgagttttcgttccactgagcgtcagaccccgtagaaaagatcaaaggatcttcttgagatcctttttttctgcgcgtaatctgctgcttgcaaacaaaaaaaccaccgctaccagcggtggtttgtttgccggatcaagagctaccaactctttttccgaaggtaactggcttcagcagagcgcagataccaaatactgtccttctagtgtagccgtagttaggccaccacttcaagaactctgtagcaccgcctacatacctcgctctgctaatcctgttaccagtggctgctgccagtggcgataagtcgtgtcttaccgggttggactcaagacgatagttaccggataaggcgcagcggtcgggctgaacggggggttcgtgcacacagcccagcttggagcgaacgacctacaccgaactgagatacctacagcgtgagctatgagaaagcgccacgcttcccgaagggagaaaggcggacaggtatccggtaagcggcagggtcggaacaggagagcgcacgagggagcttccagggggaaacgcctggtatctttatagtcctgtcgggtttcgccacctctgacttgagcgtcgatttttgtgatgctcgtcaggggggcggagcctatggaaaaacgccagcaacgcggcctttttacggttcctggccttttgctgg

SEQ ID NO: 354 - DNA, 7393 bp, Artificial
  Synthetic
agacttagggaccctgcggccgccattaattcctaatttttgttgacactctatcattgatagagttattttaccactccctatcagtgatagagaaaagtgaaatgaatagaccggccgctgagaaaaagcgaagcggcactgctctttaacaatttatcagacaatctgtgtgggcactcgaagatacggattcttaacgtcgcaagacgaaaaatgaataccaagtctcaagagtgaacacgtaattcattacgaagtttaattctttgagcgtcaaactttttaattgaagagtttgatcatggctcagattgaacgctggcggcaggcctaacacatgcaagtcgagcggcagcacagaggaacttgttccttgggtggcgagcggcggacgggtgagtaatgcctgggaaattgcccggtagagggggataaccattggaaacgatggctaataccgcataacctcgcaagagcaaagcaggggaccttcgggccttgcgctaccggatatgcccaggtgggattagctagttggtgaggtaagggctcaccaaggcgacgatccctagctggtctgagaggatgatcagccacactggaactgagacacggtccagactcctacgggaggcagcagtggggaatattgcacaatgggcgcaagcctgatgcagccatgccgcgtgtatgaagaaggccttcgggttgtaaagtactttcagtagggaggaaggtggttaagttaataccttaatcatttgacgttacctacagaagaagcaccggctaactccgtgccagcagccgcggtaatacggagggtgcaagcgttaatcggaattactgggcgtaaagcgcatgcaggtggtttgttaagtcagatgtgaaagccctgggctcaacctaggaatcgcatttgaaactgacaagctagagtactgtagaggggggtagaatttcaggtgtagcggtgaaatgcgtagagatctgaaggaataccggtggcgaaggcggccccctggacagatactgacactcagatgcgaaagcgtggggagcaaacaggattagataccctggtagtccacgccgtaaacgatgtctacttggaggttgtgacctagagtcgtggctttcggagctaacgcgttaagtagaccgcctggggagtacggtcgcaagattaaaactcaaatgaattgacgggggcccgcacaagcggtggagcatgtggtttaattcgatgcaacgcgaagaaccttacctactcttgacatccagagaatctagcggagacgctggagtgccttcgggagctctgagacaggtgctgcatggctgtcgtcagctcgtgttgtgaaatgttgggttaagtcccgcaacgagcgcaacccttatccttgtttgccagcacgtaatggtgggaactccagggagactgccggtgataaaccggaggaaggtggggacgacgtcaagtcatcatggcccttacgagtagggctacacacgtgctacaatggcgtatacagagggcagcgataccgcgaggtggagcgaatctcacaaagtacgtcgtagtccggattggagtctgcaactcgactccatgaagtcggaatcgctagtaatcgcaaatcagaatgttgcggtgaatacgttcccgggccttgtacacaccgcccgtcacaccatgggagtgggctgcaaaagaagcaggtagtttaaccggtcaacagccgtttgagctaacctgtactaattgcccgtgaggcttaaccatgagaggttaagtgactaagcgtacacggtggatgcctgggcagtcagaggcgatgaaggacgtactaacttgcgataagcgcagataaggcagtaagagccgtttgagtctgcgatttccgaatggggaaacccaactgcataagcagttactgttaactgaatacataggttaacagagcaaaccgggggaactgaaacatctaagtaccccgaggagaagaaatcaaccgagattccggtagtagcggcgagcgaacctggattagcccttaagcactcggtgaagtaggtgaacaagctggaaagcttggcgatacagggtgatagccccgtaaccgacgcttcatcgagcgtgaaatcgagtagggcgggacacgtgatatcctgtctgaatatggggggaccatcctccaaggctaaatactcctgactgaccgatagtgaaccagtaccgtgagggaaaggcgaaaagaacccctgtgaggggagtgaaatagaacctgaaaccgtgtacgtacaagcagtaggagcaccttcgtggtgtgactgcgtaccttttgtataatgggtcagcgacttatattcagtggcaaggttaaccgtataggggagccgtagcgaaagcgagtcttaattgggcgctcagtctctggatatagacccgaaaccgggtgatctagccatgggcaggttgaaggttgagtaacatcaactggaggaccgaaccgactaatgttgaaaaattagcggatgacttgtggctaggggtgaaaggccaatcaaactcggagatagctggttctccccgaaagctatttaggtagcgcctcggacgaatactactgggggtagagcactgttaaggctagggggtcatcccgacttaccaaccctttgcaaactccgaataccagtaagtactatccgggagacacacggcgggtgctaacgtccgtcgtggagagggaaacaacccagaccgccagctaaggtcccaaagtattgctaagtgggaaacgatgtgggaaggctcagacagctaggatgttggcttagaagcagccatcatttaaagaaagcgtaatagctcactagtcgagtcggcctgcgcggaagatgtaacggggctaagcaatacaccgaagctgcggcaatgtcttttagatattgggtaggggagcgttctgtaagccgttgaaggtgaatcgtaaggtttgctggaggtatcagaagtgcgaatgctgacatgagtaacgacaaagggggtgaaaaacctcctcgccggaagaccaagggttcctgtccaacgttaatcggggcagggtgagtcgacccctaaggtgaggccgaaaggcgtaatcgatgggaaacgggttaatattcccgtacttctgactattgcgatggggggacggagaaggctaggtgggccaggcgacggttgtcctggttcaagtgcgtaggcttgagagttaggtaaatccggctctctttaaggctgagacacgacgtcgagctgctacggcagtgaagtcattgatgccatgcttccaggaaaagcctctaagcttcagatagtcaggaatcgtaccccaaaccgacacaggtggtcgggtagagaataccaaggcgcttgagagaactcgggtgaaggaactaggcaaaatggtaccgtaacttcgggagaaggtacgctcttgatggtgaagtccctcgcggatggagctgacgagagtcgcagataccaggtggctgcaactgtttattaaaaacacagcactgtgcaaaatcgcaagatgacgtatacggtgtgacgcctgcccggtgccggaaggttaattgatggggttagcgcaagcgaagctcttgatcgaagccccggtaaacggcggccgtaactataacggtcctaaggtagcgaaattccttgtcgggtaagttccgacctgcacgaatggcgtaatgatggccacgctgtctccacccgagactcagtgaaattgaaatcgctgtgaagatgcagtgtacccgcggctagacggaaagaccccgtgaacctttactacagcttggcactgaacattgaacctacatgtgtaggataggtgggagtctatgaagacgtgacgccagttgcgttggagccgtccttgaaataccacccttgtatgtttgatgttctaacgttggcccctaatcggggttgcggacagtgcctggtgggtagtttgactggggcggtctcctcccaaagagtaacggaggagcacgaaggtgggctaatcacggttggacatcgtgaggttagtgcaatggcataagcccgcttaactgcgagaatgacggttcgagcaggtgcgaaagcaggtcatagtgatccggtggttctgtatggaagggccatcgctcaacggataaaaggtactccggggataacaggctgataccgcccaagagttcatatcgacggcggtgtttggcacctcgatgtcggctcatcacatcctggggctgaagtcggtcccaagggtatggctgttcgccatttaaagtggtacgcgagctgggtttagaacgtcgtgagacagttcggtccctatctgccgtgggcgttggaagattgaagggggctgctcctagtacgagaggaccggagtggacgaacctctggtgttcgggttgtgtcgccagacgcattgcccggtagctaagttcggaattgataagcgctgaaagcatctaagcgcgaagcgagccctgagatgagtcttccctgacggtttaaccgtcctaaagggttgttcgagactagaacgttgataggcagggtgtgtaagcgttgtgaggcgtacggacatggttttcgggaggacgcttgccactttgtggttcatgactggggtgaagtcgtaacaaggtagcgctaggggaacctggcgctggatcatgtggttaccttaaagaagcgtactttgtagtgctcacacagattgtctgatagaaagtgaaaagcaaggcgtttacgcgttgggagtgaggctgaagagaataaggccgttcgctttctattaatgaaagctcaccctacacgaaaatatcacgcaacgcgtgataagcaattttcgtgtccccttcgtctagaggcccaggacaccgccctttcacggcggtaacaggggttcgaatcccctaggggacgccacttgctggtttgtgagtgaaagtcgccgaccttaatatctcaaaactcatcttcgggtgatgtttgagatatttgctctttaaaaatctggatcaagctgaaaattgaaacactgaacaacgagagttgttcgtgagtctctcaaattttcgcaacacgatgatgaatcgaaaggcggatgagagaagattttcagcctgatacagattaaatcagaacgcagaagcggtctgataaaacagaatttgcttggcgaccatagcgttttggacccacctgactccatcccgaactcagaagtgaaacgaaacagcgtcgatggtagtgtggggtctccccatgtgagagtagaacatcgccaggcttcaaataaaacgaaaggctcagtcgaaagactgggcctttcgttttatctgttgtttgtcggtgaacgctctcctgagtaggacaaatccgccgggagcggatttgaacgttgcgaagcaacggcccggagggtggcgggcaggacgcccgccataaactgccaggcatcaaattaagcagaaggccatcctgacggatggcctttttgcgtttctacaaactcttcctgtcgtcatatctacaagccggcgcgccgggaaatgtgcgcggaacccctatttgtttatttttctaaatacattcaaatatgtatccgctcatgagacaataaccctgataaatgcttcaataatattgaaaaaggaagagtatgagtattcaacatttccgtgtcgcccttattcccttttttgcggcattttgccttcctgtttttgctcacccagaaacgctggtgaaagtaaaagatgctgaagatcagttgggtgcacgagtgggttacatcgaactggatctcaacagcggtaagatccttgagagttttcgccccgaagaacgttttccaatgatgagcacttttaaagttctgctatgtggcgcggtattatcccgtgttgacgccgggcaagagcaactcggtcgccgcatacactattctcagaatgacttggttgagtactcaccagtcacagaaaagcatcttacggatggcatgacagtaagagaattatgcagtgctgcaataaccatgagtgataacactgcggccaacttacttctgacaacgatcggaggaccgaaggagctaaccgcttttttgcacaacatgggggatcatgtaactcgccttgatcgttgggaaccggagctgaatgaagccataccaaacgacgagcgtgacaccacgatgcctgcagcaatggcaacaacgttgcgcaaactattaactggcgaactacttactctagcttcccggcaacaattaatagactggatggaggcggataaagttgcaggaccacttctgcgctcggcccttccggctagctggtttattgctgataaatctggagccggtgagcgtgggtctcgcggtatcattgcagcactggggccagatggtaagccctcccgtatcgtagttatctacacgacggggagtcaggcaactatggatgaacgaaatagacagatcgctgagataggtgcctcactgattaagcattggtaactgcagaccaagtttactcatatatactttagattgatttaaaacttcatttttaatttaaaaggatctaggtgaagatcctttttgataatctcatgaccaaaatcccttaacgtgagttttcgttccactgagcgtcagaccccgtagaaaagatcaaaggatcttcttgagatcctttttttctgcgcgtaatctgctgcttgcaaacaaaaaaaccaccgctaccagcggtggtttgtttgccggatcaagagctaccaactctttttccgaaggtaactggcttcagcagagcgcagataccaaatactgtccttctagtgtagccgtagttaggccaccacttcaagaactctgtagcaccgcctacatacctcgctctgctaatcctgttaccagtggctgctgccagtggcgataagtcgtgtcttaccgggttggactcaagacgatagttaccggataaggcgcagcggtcgggctgaacggggggttcgtgcacacagcccagcttggagcgaacgacctacaccgaactgagatacctacagcgtgagctatgagaaagcgccacgcttcccgaagggagaaaggcggacaggtatccggtaagcggcagggtcggaacaggagagcgcacgagggagcttccagggggaaacgcctggtatctttatagtcctgtcgggtttcgccacctctgacttgagcgtcgatttttgtgatgctcgtcaggggggcggagcctatggaaaaacgccagcaacgcggcctttttacggttcctggccttttgctgg

SEQ ID NO: 355 - DNA, 7371 bp, Artificial
  Synthetic
agacttagggaccctgcggccgccattaattcctaatttttgttgacactctatcattgatagagttattttaccactccctatcagtgatagagaaaagtgaaatgaatagaccggccgctgagaaaaagcgaagcggcactgctctttaacaatttatcagacaatctgtgtgggcactcgaagatacggattcttaacgtcgcaagacgaaaaatgaataccaagtctcaagagtgaacacgtaattcattacgaagtttaattctttgagcgtcaaactttttaattgaagagtttgatcatggctcagattgaacgctggcggcaggcctaacacatgcaagtcgaacggtaacatttctagcttgctagaagatgacgagtggcggacgggtgagtaatgcttgggaacttgcctttgcgagggggataacagttggaaacgactgctaataccgcataatgtcttcggaccaaacggggcttaggctccggcgcaaagagaggcccaagtgagattagctagttggtaaggtaacggcttaccaaggcgacgatctctagctgttctgagaggaagatcagccacactgggactgagacacggcccagactcctacgggaggcagcagtggggaatattgcacaatgggggaaaccctgatgcagccatgccgcgtgtgtgaagaaggccttcgggttgtaaagcactttcagttgtgaggaaaagttagtagttaatacctgctagccgtgacgttaacaacagaagaagcaccggctaactccgtgccagcagccgcggtaatacggagggtgcgagcgttaatcggaattactgggcgtaaagcgcacgcaggcggtttgttaagctagatgtgaaagccccgggctcaacctgggatggtcatttagaactggcagactagagtcttggagaggggagtggaattccaggtgtagcggtgaaatgcgtagatatctggaggaacatcagtggcgaaggcgactccctggccaaagactgacgctcatgtgcgaaagtgtgggtagcgaacaggattagataccctggtagtccacaccgtaaacgctgtctactagctgtgtgtgtctttaagacgtgcgtagcgaagctaacgcgctaagtagaccgcctggggagtacggccgcaaggttaaaactcaaatgaattgacgggggcccgcacaagcggtggagcatgtggtttaattcgatgcaacgcgaagaaccttacctacacttgacatgctgagaagttactagagatagtttcgtgccttcgggaactcagacacaggtgctgcatggctgtcgtcagctcgtgtcgtgagatgttgggttaagtcccgcaacgagcgcaacccttgtccttagttgccagccttaagttgggcactctaaggagactgccggtgacaaaccggaggaaggtggggacgacgtcaagtcatcatggcccttacgtgtagggctacacacgtgctacaatggcatttacagagggaagcgagacagtgatgtggagcggaccccttaaagaatgtcgtagtccggattggagtctgcaactcgactccatgaagtcggaatcgctagtaatcgcaggtcagaatactgcggtgaatacgttcccgggccttgtacacaccgcccgtcacaccatgggagtgggatgcaaaagaagtagttagtctaaccggtcaacagccgtttaagctaacctgtactaattgcccgagaggcttaaccatgagaggttaagtgacaaagcgtatacggtggatgccttggcagttagaggcgatgaaggacgtgtaagtctgcgaaaagctgtggtgagccgacaaaatgcatttgagccacagatgtccgaatggggaaacccacctatttataggtatcgttaactgaatacataggttaacgaggcaaacgaggggaactgaaacatctaagtacccttaggaaaagaaatcaaccgagattcccctagtagcggcgagcgaacggggagcagcccttaagctgtttagaatttagtggaatcctttgggaagaggagcgatacaaggtgatagccctgtacacgacggattctttacagtgaaatcgagtaggtcgggacacgtgttatcttgactgaatatggggggaccatcctccaaggctaaatactcctaactgaccgatagtgaaccagtaccgtgagggaaaggcgaaaagaacccctgtgaggggagtgaaatagaacctgaaaccgtatacgtacaagcagtgggagcccttcggggtgactgcgtaccttttgtataatgggtcagcgacttatatttagtagcaaggttaagtgaataacggagccgtagcgaaagcgagtgttaactgcgcgtttagttgctaggtatagacccgaaacccggtgatctagccatgagcaggttgaaggttgagtaacatcaactggaggaccgaacccactaacgttgaaaagttaggggatgacttgtggctgggggtgaaaggccaatcaaaccgggagatagctggttctccccgaaatctatttaggtagagcctcggacgaattccattgggggtagagcactgttaaggctagggggtcatcccgacttaccaaccctttgcaaactccgaataccaatgagaactatccgggagacacacggcgggtgctaacgtccgtcgtggagagggaaacaacccagaccgccagctaaggtcccaaaatattgctaagtgggaaacgatgtgggaaggcatagacagctaggaggttggcttagaagcagccaccctctaaagaaagcgtaatagctcactagtcgagtcggcctgcgcggaagatgtaacggggctaagcaatataccgaagctgcggcagcatgtttacatgctgggtaggggagcgttgtgtaagtggatgaaggtgagttgtaaagcttgctggacatatcacaagtgcgaatgctgacatgagtaacgataatgggagtgaaaaactcccacgccggaagaccaaggtttcctgtcccatgctaatcagggcagggtaagtcggcccctaaggcgaggcagaaatgcgtagtcgatgggaaacgggttaatattcccgtacttatataatcagtgatggagggacggagaaggctaggcaagcttggcgttggttgtccaagtgaaagtgagtaggctgaagacttaggtaaatccgggttttcaaggccgagacacgagacgagctcccaagggagtgaagttgttgatgccctgcttccaggaaaagcttctaaacttatgattatatgaaccgtaccccaaaccgacacaggtggtcaggtagagaatactaaggcgcttgagagaactcgggtgaaggaactcggcaaaattgtaccgtaacttcgggagaaggtacgcctctgtttgtgaacacttcgcgtggtaagcaaatggaggccgcagtgaccaggtggctgggactgtttattaaaaacacagcactctgcaaactcgtaagaggacgtatagggtgtgacacctgcccggtgccggaaggttaattgatggggttagttttcggacgaagctcttgatcgaagccccggtaaacggcggccgtaactataacggtcctaaggtagcgaaattccttgtcgggtaagttccgacctgcacgaatggtgtaaccatggccacgctgtctccacccgagactcagtgaaattgaaatcgcagtgaagatgctgtgtacccgcacctagacggaaagaccccgtgaacctttactacagcttggcactgaacattgaacctacatgtgtaggataggtgggaggctttgaagcacagtcgctagattgtgtggagccgtccttgaaataccacccttgtatgtttgatgttctaacattgttcccttatcgggaatgtggacagtgtctggtgggtagtttgactggggcggtctcctcccaaatagtaacggaggagcacgaaggttagctaatcacggtcggacatcgtgaggttagtgcaatggcataagctagcttaactgcgagacagacacgtcgagcaggtacgaaagtaggtcatagtgatccggtggttctgtatggaagggccatcgctcaacggataaaaggtactccggggataacaggctgataccgcccaagagttcatatcgacggcggtgtttggcacctcgatgtcggctcatcacatcctggggctgaagtcggtcccaagggtatggctgttcgccatttaaagtggtacgcgagctgggtttagaacgtcgtgagacagttcggtccctatctggtgtgggcgttggatgattgatgggagctgctcctagtacgagaggaccggagtggacgaaccgctggtgttcgggttgtcatgccaatggcattgcccggtagctatgttcggaacggataaccgctgaaagcatctaagcgggaagccggcccaaagatgagtcatccctgacctttaaggtctggaagggttgttatagacgatgacgttgataggcagggtgtggaagcgttgtaaggcgtacggacatggttttcgggaggacgattaccactttgtgtttcatgactggggtgaagtcgtaacaaggtaaccctaggggaacctggggttggatcatgtggttaccttaaagaagcgtactttgtagtgctcacacagattgtctgatagaaagtgaaaagcaaggcgtttacgcgttgggagtgaggctgaagagaataaggccgttcgctttctattaatgaaagctcaccctacacgaaaatatcacgcaacgcgtgataagcaattttcgtgtccccttcgtctagaggcccaggacaccgccctttcacggcggtaacaggggttcgaatcccctaggggacgccacttgctggtttgtgagtgaaagtcgccgaccttaatatctcaaaactcatcttcgggtgatgtttgagatatttgctctttaaaaatctggatcaagctgaaaattgaaacactgaacaacgagagttgttcgtgagtctctcaaattttcgcaacacgatgatgaatcgaaaggcggatgagagaagattttcagcctgatacagattaaatcagaacgcagaagcggtctgataaaacagaatttcctggcagccatagcgatacggtaccacctgactccattccgaactcagaagtgaaacgtattagcgccgatggtagtgtggggcttccccatgtgagagtaggacactgccaggtcccaaataaaacgaaaggctcagtcgaaagactgggcctttcgttttatctgttgtttgtcggtgaacgctctcctgagtaggacaaatccgccgggagcggatttgaacgttgcgaagcaacggcccggagggtggcgggcaggacgcccgccataaactgccaggcatcaaattaagcagaaggccatcctgacggatggcctttttgcgtttctacaaactcttcctgtcgtcatatctacaagccggcgcgccgggaaatgtgcgcggaacccctatttgtttatttttctaaatacattcaaatatgtatccgctcatgagacaataaccctgataaatgcttcaataatattgaaaaaggaagagtatgagtattcaacatttccgtgtcgcccttattcccttttttgcggcattttgccttcctgtttttgctcacccagaaacgctggtgaaagtaaaagatgctgaagatcagttgggtgcacgagtgggttacatcgaactggatctcaacagcggtaagatccttgagagttttcgccccgaagaacgttttccaatgatgagcacttttaaagttctgctatgtggcgcggtattatcccgtgttgacgccgggcaagagcaactcggtcgccgcatacactattctcagaatgacttggttgagtactcaccagtcacagaaaagcatcttacggatggcatgacagtaagagaattatgcagtgctgcaataaccatgagtgataacactgcggccaacttacttctgacaacgatcggaggaccgaaggagctaaccgcttttttgcacaacatgggggatcatgtaactcgccttgatcgttgggaaccggagctgaatgaagccataccaaacgacgagcgtgacaccacgatgcctgcagcaatggcaacaacgttgcgcaaactattaactggcgaactacttactctagcttcccggcaacaattaatagactggatggaggcggataaagttgcaggaccacttctgcgctcggcccttccggctagctggtttattgctgataaatctggagccggtgagcgtgggtctcgcggtatcattgcagcactggggccagatggtaagccctcccgtatcgtagttatctacacgacggggagtcaggcaactatggatgaacgaaatagacagatcgctgagataggtgcctcactgattaagcattggtaactgcagaccaagtttactcatatatactttagattgatttaaaacttcatttttaatttaaaaggatctaggtgaagatcctttttgataatctcatgaccaaaatcccttaacgtgagttttcgttccactgagcgtcagaccccgtagaaaagatcaaaggatcttcttgagatcctttttttctgcgcgtaatctgctgcttgcaaacaaaaaaaccaccgctaccagcggtggtttgtttgccggatcaagagctaccaactctttttccgaaggtaactggcttcagcagagcgcagataccaaatactgtccttctagtgtagccgtagttaggccaccacttcaagaactctgtagcaccgcctacatacctcgctctgctaatcctgttaccagtggctgctgccagtggcgataagtcgtgtcttaccgggttggactcaagacgatagttaccggataaggcgcagcggtcgggctgaacggggggttcgtgcacacagcccagcttggagcgaacgacctacaccgaactgagatacctacagcgtgagctatgagaaagcgccacgcttcccgaagggagaaaggcggacaggtatccggtaagcggcagggtcggaacaggagagcgcacgagggagcttccagggggaaacgcctggtatctttatagtcctgtcgggtttcgccacctctgacttgagcgtcgatttttgtgatgctcgtcaggggggcggagcctatggaaaaacgccagcaacgcggcctttttacggttcctggccttttgctgg

SEQ ID NO: 356 - DNA, 7392 bp, Artificial
  Synthetic
agacttagggaccctgcggccgccattaattcctaatttttgttgacactctatcattgatagagttattttaccactccctatcagtgatagagaaaagtgaaatgaatagaccggccgctgagaaaaagcgaagcggcactgctctttaacaatttatcagacaatctgtgtgggcactcgaagatacggattcttaacgtcgcaagacgaaaaatgaataccaagtctcaagagtgaacacgtaattcattacgaagtttaattctttgagcgtcaaacttttaaactgaagagtttgatcatggctcagattgaacgctggcggcaggcctaacacatgcaagtcgagcggtaacaggagaagcttgcttcttgctgacgagcggcggacgggtgagtaatacttgggtatctgcccgatagtgggggacaacacggggaaactcgtgctaataccgcatacgtcctacgggagaaagcaggcttaggcttgcgctatcggatgagcccaagtcggattagctagttggtgaggtaaaggctcaccaaggcgacgatccgtaactggtctgagaggatgatcagtcacaccgggactgagacacggcccggactcctacgggaggcagcagtggggaatattggacaatgggggcaaccctgatccagccatgccgcgtgtgtgaagaaggccttagggttgtaaagcactttcagtgaggaggaaaagttagtggttaatacccactagccgtgacgttactcacagaagaagcaccggcaaactccgtgccagcagccgcggtaatacggagggtgcgagcgttaatcggaattactgggcgtaaagcgcgcgtaggcggtttgttaagccggttgtgaaagccctaggctcaacctaggaactgcacccggaactggcaagctagagtacagtagaggaaggtggaattccacgtgtagcggtgaaatgcgtagatatgtggaggaacatcagtggcgaaggcggccttctggactgatactgacgctgaggtgcgaaagcgtggggagcaaacaggattagataccctggtagtccacgccgtaaacgatgtcaactagttgttggaacccttgaggttttagtaacgcagctaacgcattaagttgaccgcctggggagtacggccgcaaggttaaaactcaaatgaattgacgggggcccgcacaagcggtggagcatgtggtttaattcgatgcaacgcgaagaaccttacctactcttgacatccagagaatttgctagagatagcttagtgccttcgggaactctgagacaggtgctgcatggctgtcgtcagctcgtgttgtgaaatgttgggttaagtcccgtaacgagcgcaacccctatccttatttgccagcgagttaagtcgggaactctaaggagactgccggtgacaaaccggaggaaggtggggatgacgtcaagtcatcatggcccttacgagtagggctacacacgtgctacaatggttggtacagcaggttgctaacccgcgagggggcgctaatccgtcaaaaccgatcgtagtccggatcgcagtctgcaactcgactgcgtgaagtcggaatcgctagtaatcgcggatcagaatgccgcggtgaatacgttcccgggccttgtacacaccgcccgtcacaccatgggagttgattgcaccagaagtagctagcttaaccggtcaacagccgtttgagctaaccaatactaatgacccgtgaggcttgaccatgagaggtcaagtgactaagcgcatacggtggatgcctaggcagtcagaggcgatgaaagacgttgtagcctgcgataagcttcggggaggtggcaaacaacctttgatccggagatttctgaatggggaaacccacccgccataaggcgggtatctataactgaatacataggttatagaggcaaaccgggagaactgaaacatctaagtaacccgaggaaaagaaatcaattgagattcccacagtagcggcgagcgacctgggatcagcccttaagtcagtttagtgttagtagaaggctctggaaagtgccgccctagcaggtgatagccctgtatacgaaaatgctttactggtgaaaacgagtaggacgggacacgagaaatcctgtctgaagatggggggaccatcctccaaggctaaatactcctgactgaccgatagtgaaccagtaccgtgagggaaaggcgaaaagaacccctgttaggggagtgaaatagatcctgaaaccgtatgcgtacaagcagtcggagcagacttgttctgtgacggcgtaccttttgtataatgggtcagcgacttattttcagtggcgaggttaaccgtataggggagccgtagagaaatcgagtcttaatagggcgtgcagtcgctgggaatagacccgaaaccgggcgatctacccatgagcaggttgaaggttgagtaacatcaactggaggaccgaacccacgtatgttgaaaaatgcggggatgacttgtgggtcggagtgaaaggctaatcaagctcggagatagctggttctcctcgaaagctatttaggtagcgcctcgtgtatcaccaccggaggtagagcactgtttgggctagggggtcatcccgacttaccaaccccatgcaaactccgaataccggtgagtgcaagcacgggagacacacggcgggtgctaacgtccgtcgtggaaagggaaacaacccagaccgtcagctaaggccccaaaatcctgattaagtggaaaacgatgtgggaaggcatagacagctaggaggttggcttagaagcagccatcctttaaagaaagcgtaatagctcactagtcgagtcggcctgcgcggaagatttaacggggctcaaatcaggtgccgaagctacgggttcattttaaaatgagcggtagaggagcgttgtgtaagccgtcgaaggtgtgttgagaagcatgctggaggtatcacaagtgcgaatgctgacataagtaacgataaggggtgtgaaaaacacccccgccggaagaccaaggtttcctatcccatgctaatcagggtagggtgagtcggcacctaaggcgaggctgaaaagcgtagtcgatggaaagcaggttaatattcctgcacttgttattgctgcgatgggaggacggagaaggctaggtgagccaggcgttggttgtcctggtgaaagtgcgtaggtggtggttttaggcaaatccggaaccacacacaccgagacacgagaggaagaggatcttcggagaatcgaactcattgatgccacgcttccaggaaaagtctctaagcttcaggtaataacaaaccgtaccccaaaccgacacaggtggtcaggtcgagaagaccaaggcgcttgagagaactcgggtgaaggaactaggcaaaatggtgccgtaacttcgggagaaggcacaccgacgcgtaggtgacgttaacactaaccaagctgaagtcggtcgaagataccaggcccctgcaactgtttattaaaaacacaggactctgcaaacacgtaagtggacgtatagggtctgacgcctgcccggtgccggaaggttaattgatggggttagcgtaagcgaagctcttgatcgaagccccggtaaacggcggccgtaactataacggtcctaaggtagcgaaattccttgtcgggtaagttccgacctgcacgaatggcgtaatgatgggggcgctgtctccacccgagactcagtgaaattgaaatcgccgtgaagatgcggtgtatccgcggctagacggaaagaccccgtgaacctttactatagcttcacactggactttgatattgcttgtgtaggatagctgggagactaagaaccatcgacgctagtcggtgcggagtcaaccttgaaataccagcctggcaatcttgaggttctaacctaggtccattatctggatcggggaccgtgtgtggtgggtagtttgactggggcggtctcctcctaaagagtaacggaggagcacaaaggtaccctcaggctggtcggaaatcagtcaatgagtgcaagagcataagggtgcttgactgcgagacagacacgtcgagcaggtacgaaagtaggttctagtgatccggtggttctgtatggaagggccatcgctcaacggataaaaggtactccggggataacaggctgataccgcccaagagttcacatcgacggcggtgtttggcacctcgatgtcggctcatcacatcctggggctgaagtcggtcccaagggtatggctgttcgccatttaaagtggtacgcgagctgggtttagaacgtcgtgagacagttcggtccctatctgccgtggacgttggagacttgagaagagctgctcctagtacgagaggaccggagtggacgaaccgctggtgtttgggttgtcatgccaatggcactgcccagtagctacgttcggacaggataaccgctgaaagcatctaagcgggaagcccccttcaagattaggtctccctgagagcttgactctcctaaagggcccttgaagactacaaggttgataggttgggtgtggaagtgcagcaatgcatacggacatggttttcgggagggcggttaccacggtgtggttaatgactggggtgaagtcgtaacaaggtagccgtaggggaacctgcggctggatcatgtggttaccttaaagaagcgtactttgtagtgctcacacagattgtctgatagaaagtgaaaagcaaggcgtttacgcgttgggagtgaggctgaagagaataaggccgttcgctttctattaatgaaagctcaccctacacgaaaatatcacgcaacgcgtgataagcaattttcgtgtccccttcgtctagaggcccaggacaccgccctttcacggcggtaacaggggttcgaatcccctaggggacgccacttgctggtttgtgagtgaaagtcgccgaccttaatatctcaaaactcatcttcgggtgatgtttgagatatttgctctttaaaaatctggatcaagctgaaaattgaaacactgaacaacgagagttgttcgtgagtctctcaaattttcgcaacacgatgatgaatcgaaaggcggatgagagaagattttcagcctgatacagattaaatcagaacgcagaagcggtctgataaaacagaattagcctgacgaccatagcaagtgggaaccacctgataccttgccgaactcagaagtgaaaccgctcagcgccgatgatagtgtggggtctccccatgtgaaagtaggtcatcgtcaggcgccaaataaaacgaaaggctcagtcgaaagactgggcctttcgttttatctgttgtttgtcggtgaacgctctcctgagtaggacaaatccgccgggagcggatttgaacgttgcgaagcaacggcccggagggtggcgggcaggacgcccgccataaactgccaggcatcaaattaagcagaaggccatcctgacggatggcctttttgcgtttctacaaactcttcctgtcgtcatatctacaagccggcgcgccgggaaatgtgcgcggaacccctatttgtttatttttctaaatacattcaaatatgtatccgctcatgagacaataaccctgataaatgcttcaataatattgaaaaaggaagagtatgagtattcaacatttccgtgtcgcccttattcccttttttgcggcattttgccttcctgtttttgctcacccagaaacgctggtgaaagtaaaagatgctgaagatcagttgggtgcacgagtgggttacatcgaactggatctcaacagcggtaagatccttgagagttttcgccccgaagaacgttttccaatgatgagcacttttaaagttctgctatgtggcgcggtattatcccgtgttgacgccgggcaagagcaactcggtcgccgcatacactattctcagaatgacttggttgagtactcaccagtcacagaaaagcatcttacggatggcatgacagtaagagaattatgcagtgctgcaataaccatgagtgataacactgcggccaacttacttctgacaacgatcggaggaccgaaggagctaaccgcttttttgcacaacatgggggatcatgtaactcgccttgatcgttgggaaccggagctgaatgaagccataccaaacgacgagcgtgacaccacgatgcctgcagcaatggcaacaacgttgcgcaaactattaactggcgaactacttactctagcttcccggcaacaattaatagactggatggaggcggataaagttgcaggaccacttctgcgctcggcccttccggctagctggtttattgctgataaatctggagccggtgagcgtgggtctcgcggtatcattgcagcactggggccagatggtaagccctcccgtatcgtagttatctacacgacggggagtcaggcaactatggatgaacgaaatagacagatcgctgagataggtgcctcactgattaagcattggtaactgcagaccaagtttactcatatatactttagattgatttaaaacttcatttttaatttaaaaggatctaggtgaagatcctttttgataatctcatgaccaaaatcccttaacgtgagttttcgttccactgagcgtcagaccccgtagaaaagatcaaaggatcttcttgagatcctttttttctgcgcgtaatctgctgcttgcaaacaaaaaaaccaccgctaccagcggtggtttgtttgccggatcaagagctaccaactctttttccgaaggtaactggcttcagcagagcgcagataccaaatactgtccttctagtgtagccgtagttaggccaccacttcaagaactctgtagcaccgcctacatacctcgctctgctaatcctgttaccagtggctgctgccagtggcgataagtcgtgtcttaccgggttggactcaagacgatagttaccggataaggcgcagcggtcgggctgaacggggggttcgtgcacacagcccagcttggagcgaacgacctacaccgaactgagatacctacagcgtgagctatgagaaagcgccacgcttcccgaagggagaaaggcggacaggtatccggtaagcggcagggtcggaacaggagagcgcacgagggagcttccagggggaaacgcctggtatctttatagtcctgtcgggtttcgccacctctgacttgagcgtcgatttttgtgatgctcgtcaggggggcggagcctatggaaaaacgccagcaacgcggcctttttacggttcctggccttttgctgg

SEQ ID NO: 357 - DNA, 7390 bp, Artificial
  Synthetic
agacttagggaccctgcggccgccattaattcctaatttttgttgacactctatcattgatagagttattttaccactccctatcagtgatagagaaaagtgaaatgaatagaccggccgctgagaaaaagcgaagcggcactgctctttaacaatttatcagacaatctgtgtgggcactcgaagatacggattcttaacgtcgcaagacgaaaaatgaataccaagtctcaagagtgaacacgtaattcattacgaagtttaattctttgagcgtcaaacttttgaactgaagagtttgatcatggctcagattgaacgctggcggcaggcctaacacatgcaagtcgagcggatgaagggagcttgctcctggattcagcggcggacgggtgagtaatgcctaggaatctgcctggtagtgggggataacgtccggaaacgggcgctaataccgcatacgtcctgagggagaaagtgggggatcttcggacctcacgctatcagatgagcctaggtcggattagctagttggtggggtaaaggcctaccaaggcgacgatccgtaactggtctgagaggatgatcagtcacactggaactgagacacggtccagactcctacgggaggcagcagtggggaatattggacaatgggcgaaagcctgatccagccatgccgcgtgtgtgaagaaggtcttcggattgtaaagcactttaagttgggaggaagggcagtaagttaataccttgctgttttgacgttaccaacagaataagcaccggctaacttcgtgccagcagccgcggtaatacgaagggtgcaagcgttaatcggaattactgggcgtaaagcgcgcgtaggtggttcagcaagttggatgtgaaatccccgggctcaacctgggaactgcatccaaaactactgagctagagtacggtagagggtggtggaatttcctgtgtagcggtgaaatgcgtagatataggaaggaacaccagtggcgaaggcgaccacctggactgatactgacactgaggtgcgaaagcgtggggagcaaacaggattagataccctggtagtccacgccgtaaacgatgtcgactagccgttgggatccttgagatcttagtggcgcagctaacgcgataagtcgaccgcctggggagtacggccgcaaggttaaaactcaaatgaattgacgggggcccgcacaagcggtggagcatgtggtttaattcgaagcaacgcgaagaaccttacctggccttgacatgctgagaactttccagagatggattggtgccttcgggaactcagacacaggtgctgcatggctgtcgtcagctcgtgtcgtgagatgttgggttaagtcccgtaacgagcgcaacccttgtccttagttaccagcacctcgggtgggcactctaaggagactgccggtgacaaaccggaggaaggtggggatgacgtcaagtcatcatggcccttacggccagggctacacacgtgctacaatggtcggtacaaagggttgccaagccgcgaggtggagctaatcccataaaaccgatcgtagtccggatcgcagtctgcaactcgactgcgtgaagtcggaatcgctagtaatcgtgaatcagaatgtcacggtgaatacgttcccgggccttgtacacaccgcccgtcacaccatgggagtgggttgctccagaagtagctagtctaaccggtcaacagccgtttgagctaaccagtactaattgcccgtgaggcttgaccatgagaggtcaagtgaagaagcgcatacggtggatgccttggcagtcagaggcgatgaaagacgtggtagcctgcgaaaagcttcggggagtcggcaaacagactttgatccggagatctctgaatgggggaacccacctaggataacctaggtatcttgtactgaatccataggtgcaagaggcgaaccaggggaactgaaacatctaagtaccctgaggaaaagaaatcaaccgagattcccttagtagtggcgagcgaacggggattagcccttaagcttcattgattttagcggaacgctctggaaagtgcggccatagtgggtgatagccccgtacgcgaaaggatctttgaagtgaaatcgagtaggacggagcacgagaaactttgtctgaacatggggggaccatcctccaaggctaaatactactgactgaccgatagtgaaccagtaccgtgagggaaaggcgaaaagaaccccggagaggggagtgaaatagaacctgaaaccgtatgcgtacaagcagtgggagcctacttgttaggtgactgcgtaccttttgtataatgggtcagcgacttatattcagtggcaagcttaaccgtatagggtaggcgtagcgaaagcgagtcttaatagggcgtttagtcgctgggtatagacccgaaaccgggcgatctatccatgagcaggttgaaggttaggtaacactgactggaggaccgaacccactcccgttgaaaaggtaggggatgacttgtggatcggagtgaaaggctaatcaagctcggagatagctggttctcctcgaaagctatttaggtagcgcctcatgtatcactctggggggtagagcactgtttcggctagggggtcatcccgacttaccaaaccgatgcaaactccgaatacccagaagtgccgagcatgggagacacacggcgggtgctaacgtccgtcgtgaaaagggaaacaacccagaccgccagctaaggtcccaaagttgtggttaagtggtaaacgatgtgggaaggcttagacagctaggaggttggcttagaagcagccaccctttaaagaaagcgtaatagctcactagtcgagtcggcctgcgcggaagatgtaacggggctcaaaccacacaccgaagctgcgggtgtcacgtaagtgacgcggtagaggagcgttctgtaagcctgtgaaggtgagttgagaagcttgctggaggtatcagaagtgcgaatgctgacatgagtaacgacaatgggtgtgaaaaacacccacgccgaaagaccaagggttcctgcgcaacgttaatcgacgcagggttagtcggttcctaaggcgaggctgaaaagcgtagtcgatgggaaacaggttaatattcctgtacttctggttactgcgatggagggacggagaaggctaggccagcttggcgttggttgtccaagtttaaggtggtaggctgaaatcttaggtaaatccggggtttcaaggccgagagctgatgacgagtcgtcttttagatgacgaagtggttgatgccatgcttccaagaaaagcttctaagcttcaggtaaccaggaaccgtaccccaaaccgacacaggtggtcgggtagagaataccaaggcgcttgagagaactcgggtgaaggaactaggcaaaatggcaccgtaacttcgggagaaggtgcgccggctagggtgaaggatttactccgtaagctctggctggtcgaagataccaggccgctgcgactgtttattaaaaacacagcactctgcaaacacgaaagtggacgtatagggtgtgacgcctgcccggtgccggaaggttaattgatggggttagcgcaagcgaagctcttgatcgaagccccggtaaacggcggccgtaactataacggtcctaaggtagcgaaattccttgtcgggtaagttccgacctgcacgaatggcgtaacgatggcggcgctgtctccacccgagactcagtgaaattgaaatcgctgtgaagatgcagtgtatccgcggctagacggaaagaccccgtgaacctttactgtagctttgcactggactttgagcctgcttgtgtaggataggtgggaggctttgaagcgtggacgccagttcgcgtggagccatccttgaaataccaccctggcatgcttgaggttctaactctggtccgtaatccggatcgaggacagtgtatggtgggcagtttgactggggcggtctcctcctaaagagtaacggaggagtacgaaggtgcgctcagaccggtcggaaatcggtcgcagagtataaaggcaaaagcgcgcttgactgcgagacagacacgtcgagcaggtacgaaagtaggtcttagtgatccggtggttctgtatggaagggccatcgctcaacggataaaaggtactccggggataacaggctgataccgcccaagagttcatatcgacggcggtgtttggcacctcgatgtcggctcatcacatcctggggctgaagccggtcccaagggtatggctgttcgccatttaaagtggtacgcgagctgggtttagaacgtcgtgagacagttcggtccctatctgccgtggacgtttgagatttgagaggggctgctcctagtacgagaggaccggagtggacgaacctctggtgttccggttgtcacgccagtggcattgccgggtagctatgttcggaaaagataaccgctgaaagcatctaagcgggaaacttgcctcaagatgagatctcactgggaacttgattcccctgaagggccgtcgaagactacgacgttgataggctgggtgtgtaagcgttgtgaggcgtacggacatggttgcaagggggacggttaccacggagtgattcatgactggggtgaagtcgtaacaaggtagccgtaggggaacctgcggctggatcatgtggttaccttaaagaagcgtactttgtagtgctcacacagattgtctgatagaaagtgaaaagcaaggcgtttacgcgttgggagtgaggctgaagagaataaggccgttcgctttctattaatgaaagctcaccctacacgaaaatatcacgcaacgcgtgataagcaattttcgtgtccccttcgtctagaggcccaggacaccgccctttcacggcggtaacaggggttcgaatcccctaggggacgccacttgctggtttgtgagtgaaagtcgccgaccttaatatctcaaaactcatcttcgggtgatgtttgagatatttgctctttaaaaatctggatcaagctgaaaattgaaacactgaacaacgagagttgttcgtgagtctctcaaattttcgcaacacgatgatgaatcgaaaggcggatgagagaagattttcagcctgatacagattaaatcagaacgcagaagcggtctgataaaacagaatttgcttgacgatcatagagcgttggaaccacctgatcccttcccgaactcagaagtgaaacgacgcatcgccgatggtagtgtggggtctccccatgtgagagtaggtcatcgtcaagctccaaataaaacgaaaggctcagtcgaaagactgggcctttcgttttatctgttgtttgtcggtgaacgctctcctgagtaggacaaatccgccgggagcggatttgaacgttgcgaagcaacggcccggagggtggcgggcaggacgcccgccataaactgccaggcatcaaattaagcagaaggccatcctgacggatggcctttttgcgtttctacaaactcttcctgtcgtcatatctacaagccggcgcgccgggaaatgtgcgcggaacccctatttgtttatttttctaaatacattcaaatatgtatccgctcatgagacaataaccctgataaatgcttcaataatattgaaaaaggaagagtatgagtattcaacatttccgtgtcgcccttattcccttttttgcggcattttgccttcctgtttttgctcacccagaaacgctggtgaaagtaaaagatgctgaagatcagttgggtgcacgagtgggttacatcgaactggatctcaacagcggtaagatccttgagagttttcgccccgaagaacgttttccaatgatgagcacttttaaagttctgctatgtggcgcggtattatcccgtgttgacgccgggcaagagcaactcggtcgccgcatacactattctcagaatgacttggttgagtactcaccagtcacagaaaagcatcttacggatggcatgacagtaagagaattatgcagtgctgcaataaccatgagtgataacactgcggccaacttacttctgacaacgatcggaggaccgaaggagctaaccgcttttttgcacaacatgggggatcatgtaactcgccttgatcgttgggaaccggagctgaatgaagccataccaaacgacgagcgtgacaccacgatgcctgcagcaatggcaacaacgttgcgcaaactattaactggcgaactacttactctagcttcccggcaacaattaatagactggatggaggcggataaagttgcaggaccacttctgcgctcggcccttccggctagctggtttattgctgataaatctggagccggtgagcgtgggtctcgcggtatcattgcagcactggggccagatggtaagccctcccgtatcgtagttatctacacgacggggagtcaggcaactatggatgaacgaaatagacagatcgctgagataggtgcctcactgattaagcattggtaactgcagaccaagtttactcatatatactttagattgatttaaaacttcatttttaatttaaaaggatctaggtgaagatcctttttgataatctcatgaccaaaatcccttaacgtgagttttcgttccactgagcgtcagaccccgtagaaaagatcaaaggatcttcttgagatcctttttttctgcgcgtaatctgctgcttgcaaacaaaaaaaccaccgctaccagcggtggtttgtttgccggatcaagagctaccaactctttttccgaaggtaactggcttcagcagagcgcagataccaaatactgtccttctagtgtagccgtagttaggccaccacttcaagaactctgtagcaccgcctacatacctcgctctgctaatcctgttaccagtggctgctgccagtggcgataagtcgtgtcttaccgggttggactcaagacgatagttaccggataaggcgcagcggtcgggctgaacggggggttcgtgcacacagcccagcttggagcgaacgacctacaccgaactgagatacctacagcgtgagctatgagaaagcgccacgcttcccgaagggagaaaggcggacaggtatccggtaagcggcagggtcggaacaggagagcgcacgagggagcttccagggggaaacgcctggtatctttatagtcctgtcgggtttcgccacctctgacttgagcgtcgatttttgtgatgctcgtcaggggggcggagcctatggaaaaacgccagcaacgcggcctttttacggttcctggccttttgctgg

SEQ ID NO: 358 - DNA, 7373 bp, Artificial
  Synthetic
agacttagggaccctgcggccgccattaattcctaatttttgttgacactctatcattgatagagttattttaccactccctatcagtgatagagaaaagtgaaatgaatagaccggccgctgagaaaaagcgaagcggcactgctctttaacaatttatcagacaatctgtgtgggcactcgaagatacggattcttaacgtcgcaagacgaaaaatgaataccaagtctcaagagtgaacacgtaattcattacgaagtttaattctttgagcgtcaaactttttaactgaagagtttgatcatggctcagattgaacgctggcggcaggcttaacacatgcaagtcgagcgggggaaggtagcttgctaccggacctagcggcggacgggtgagtaatgcttaggaatctgcctattagtgggggacaacatctcgaaagggatgctaataccgcatacgtcctacgggagaaagcaggggatcttcggaccttgcgctaatagatgagcctaagtcggattagctagttggtggggtaaaggcctaccaaggcgacgatctgtagcgggtctgagaggatgatccgccacactgggactgagacacggcccagactcctacgggaggcagcagtggggaatattggacaatgggcgcaagcctgatccagccatgccgcgtgtgtgaagaaggccttatggttgtaaagcactttaagcgaggaggaggctactttagataatacctagagatagtggacgttactcgcagaataagcaccggctaactctgtgccagcagccgcggtaatacagagggtgcaagcgttaatcggatttactgggcgtaaagcgcgcgtaggcggctaattaagtcaaatgtgaaatccccgagcttaacttgggaattgcattcgatactggttagctagagtgtgggagaggatggtagaattccaggtgtagcggtgaaatgcgtagagatctggaggaataccgatggcgaaggcagccatctggcctaacactgacgctgaggtgcgaaagcatggggagcaaacaggattagataccctggtagtccatgccgtaaacgatgtctactagccgttggggcctttgaggctttagtggcgcagctaacgcgataagtagaccgcctggggagtacggtcgcaagactaaaactcaaatgaattgacgggggcccgcacaagcggtggagcatgtggtttaattcgatgcaacgcgaagaaccttacctggccttgacatagtaagaactttccagagatggattggtgccttcgggaacttacatacaggtgctgcatggctgtcgtcagctcgtgtcgtgagatgttgggttaagtcccgcaacgagcgcaacccttttccttatttgccagcgagtaatgtcgggaactttaaggatactgccagtgacaaactggaggaaggcggggacgacgtcaagtcatcatggcccttacggccagggctacacacgtgctacaatggtcggtacaaagggttgctacacagcgatgtgatgctaatctcaaaaagccgatcgtagtccggattggagtctgcaactcgactccatgaagtcggaatcgctagtaatcgcggatcagaatgccgcggtgaatacgttcccgggccttgtacacaccgcccgtcacaccatgggagtttgttgcaccagaagtagctagcctaacggtcaacagccgttgaagctgaccaatactaattgctcgtgaggcttgactatgagaagtcaagtaattaagtgcatgtggtggatgccttggcagtcagaggcgatgaaagacgtgatagcctgcgaaaagctccggggaggcggcaaatatcctttgatccggagatgtctgaatgggggaacccacctactttaaggtaggtattgcaacatgaatacatagtgttgcaaggcgaacgaggggaagtgaaacatctcagtacccttaggaaaagaaatcaattgagattccctcagtagcggcgagcgaacggggatcagcccattaagttatgtgtgttttagtggaacgctctgggaagtgcgaacgtagagggtgatattcccgtacacgaaagggcacacataatgatgacgagtagggcgaggcacgtgaaaccttgtctgaatatggggggaccatcctccaaggctaaatactcctgactgaccgatagtgaaccagtaccgtgagggaaaggcgaaaagaacccctgtgaggggagtgaaatagatcctgaaaccgcatgcatacaagcagtgggagcaccttcgtggtgtgactgcgtaccttttgtataatgggtcagcgacttatattcagtagcgaggttaaccgtataggggagccgtagagaaatcgagtcttaatagggcgtttagttgctgggtatagacccgaaaccaggcgatctatccatgagcaggttgaaggttgggtaacactaactggaggaccgaacccactgtcgttgaaaagccaggggatgacttgtggataggggtgaaaggctaatcaagcctggtgatagctggttctccccgaaagctatttaggtagcgcctcggacgaataccatagggggtagagcactgtttcggctagggggtcatcccgacttaccaaaccgatgcaaactccgaatacctatgagtactatccgggagacagactgcgggtgctaacgtccgtagtcaagaggaaaacaatccagaccgccagctaaggccccaaaatcatagttaagtgggaaacgatgtgggaaggcatagacagctaggaggttggcttagaagcagccaccctttaaagaaagcgtaatagctcactagtcgagtcggcctgcgcggaagatgtaacggggctaaaactatgtgccgaagctgcggatttgacattagtcaagtggtaggggagcgttctgtaagccgatgaaggtgtattgagaagtatgctggaggtatcagaagtgcgaatgctgacgtgagtaacgacaaaacgggtgaaaaacccgttcgccgaaagaccaagggttccagtccaacgttaatcggggctgggtgagtcgacccctaaggcgaggccgaaaggcgtagtcgatgggaaattggttaatattccaatacttctgtgtaatgcgatgagaggacggagaaggttaagtcagcctggcgttggttgtccaggtggaaggatgtaggtatgtatcttaggcaaatccggggtactctatactgagatccgatagcaagctgtacttgtacagcgaagtggctgataccatgcttccaggaaaagtctctaagcttcagttacacaggaatcgtacccgaaaccgacacaggtggtcaggtcgagtagaccaaggcgcttgagagaactctgctgaaggaactaggcaaaatggtaccgtaacttcgggagaaggtacgctgttgttggtgatggaacttgcttcctgagctgatgacagccgcagaaaccaggccgctgcaactgtttattaaaaacatagcactctgcaaacacgaaagtggacgtatagggtgtgatgcctgcccggtgctggaaggttaattgatggggttagcgtaagcgaagctcttgatcgaagccccagtaaacggcggccgtaactataacggtcctaaggtagcgaaattccttgtcgggtaagttccgacctgcacgaatggcataatgatggcggcgctgtctccagcagaggctcagtgaaatcgaaatcgctgtgaagatgcagtgtacccgcggctagacggaaagaccccgtgaacctttactgcagcttgacactgaactttgaccttacttgtgtaggataggtgggaggctttgaagttggaacgctagttccaatggagccgtccttgaaataccaccctggtaatgttgaggttctaactctgtcccgttatccgggacgaggaccgtgtctggtgggtagtttgactggggcggtctcctcctaaagagtaacggaggagtacgaaggtgcgctcagcgtggtcggaaatcacgcatagagtataaaggcaaaagcgcgcttaactgcgagacccacaagtcgagcaggtacgaaagtaggtcttagtgatccggtggttctgtatggaagggccatcgctcaacggataaaaggtactctggggataacaggctgataccgcccaagagttcatatcgacggcggtgtttggcacctcgatgtcggctcatctcatcctggggctgaagcaggtcccaagggtatggctgttcgccatttaaagaggtacgcgagctgggtttagaacgtcgtgagacagttcggtccctatctaccgtgggcgctggaaatttgagaggatctgctcctagtacgagaggaccagagtggacgaacctctggtgtaccggttgtgacgccagtcgcatcgccgggtagctatgttcggaagggataaccgctgaaagcatctaagcgggaagcctacctcaagataagatttccctaggaatttattcctctaaagagccgttcgagactaggacgttgataggttggatgtggaaacggacatggttaagagggcggttaccacggtgtggccgatgactggggtgaagtcgtaacaaggtagccgtaggggaacctgcggctggatcatgtggtatccttaaagaagcgtactttgtagtgctcacacagattgtctgatagaaagtgaaaagcaaggcgtttacgcgttgggagtgaggctgaagagaataaggccgttcgctttctattaatgaaagctcaccctacacgaaaatatcacgcaacgcgtgataagcaattttcgtgtccccttcgtctagaggcccaggacaccgccctttcacggcggtaacaggggttcgaatcccctaggggacgccacttgctggtttgtgagtgaaagtcgccgaccttaatatctcaaaactcatcttcgggtgatgtttgagatatttgctctttaaaaatctggatcaagctgaaaattgaaacactgaacaacgagagttgttcgtgagtctctcaaattttcgcaacacgatgatgaatcgaaaggcggatgagagaagattttcagcctgatacagattaaatcagaacgcagaagcggtctgataaaacagaattgtgctggcgaccatagcaagagtgaaccacctgatcccttcccgaactcagaagtgaaacctcttagcgctgatggtagtgtggggttacccatgtgagagtaagtcatcgccagctcacaaataaaacgaaaggctcagtcgaaagactgggcctttcgttttatctgttgtttgtcggtgaacgctctcctgagtaggacaaatccgccgggagcggatttgaacgttgcgaagcaacggcccggagggtggcgggcaggacgcccgccataaactgccaggcatcaaattaagcagaaggccatcctgacggatggcctttttgcgtttctacaaactcttcctgtcgtcatatctacaagccggcgcgccgggaaatgtgcgcggaacccctatttgtttatttttctaaatacattcaaatatgtatccgctcatgagacaataaccctgataaatgcttcaataatattgaaaaaggaagagtatgagtattcaacatttccgtgtcgcccttattcccttttttgcggcattttgccttcctgtttttgctcacccagaaacgctggtgaaagtaaaagatgctgaagatcagttgggtgcacgagtgggttacatcgaactggatctcaacagcggtaagatccttgagagttttcgccccgaagaacgttttccaatgatgagcacttttaaagttctgctatgtggcgcggtattatcccgtgttgacgccgggcaagagcaactcggtcgccgcatacactattctcagaatgacttggttgagtactcaccagtcacagaaaagcatcttacggatggcatgacagtaagagaattatgcagtgctgcaataaccatgagtgataacactgcggccaacttacttctgacaacgatcggaggaccgaaggagctaaccgcttttttgcacaacatgggggatcatgtaactcgccttgatcgttgggaaccggagctgaatgaagccataccaaacgacgagcgtgacaccacgatgcctgcagcaatggcaacaacgttgcgcaaactattaactggcgaactacttactctagcttcccggcaacaattaatagactggatggaggcggataaagttgcaggaccacttctgcgctcggcccttccggctagctggtttattgctgataaatctggagccggtgagcgtgggtctcgcggtatcattgcagcactggggccagatggtaagccctcccgtatcgtagttatctacacgacggggagtcaggcaactatggatgaacgaaatagacagatcgctgagataggtgcctcactgattaagcattggtaactgcagaccaagtttactcatatatactttagattgatttaaaacttcatttttaatttaaaaggatctaggtgaagatcctttttgataatctcatgaccaaaatcccttaacgtgagttttcgttccactgagcgtcagaccccgtagaaaagatcaaaggatcttcttgagatcctttttttctgcgcgtaatctgctgcttgcaaacaaaaaaaccaccgctaccagcggtggtttgtttgccggatcaagagctaccaactctttttccgaaggtaactggcttcagcagagcgcagataccaaatactgtccttctagtgtagccgtagttaggccaccacttcaagaactctgtagcaccgcctacatacctcgctctgctaatcctgttaccagtggctgctgccagtggcgataagtcgtgtcttaccgggttggactcaagacgatagttaccggataaggcgcagcggtcgggctgaacggggggttcgtgcacacagcccagcttggagcgaacgacctacaccgaactgagatacctacagcgtgagctatgagaaagcgccacgcttcccgaagggagaaaggcggacaggtatccggtaagcggcagggtcggaacaggagagcgcacgagggagcttccagggggaaacgcctggtatctttatagtcctgtcgggtttcgccacctctgacttgagcgtcgatttttgtgatgctcgtcaggggggcggagcctatggaaaaacgccagcaacgcggcctttttacggttcctggccttttgctgg

SEQ ID NO: 359 - DNA, 7383 bp, Artificial
  Synthetic
agacttagggaccctgcggccgccattaattcctaatttttgttgacactctatcattgatagagttattttaccactccctatcagtgatagagaaaagtgaaatgaatagaccggccgctgagaaaaagcgaagcggcactgctctttaacaatttatcagacaatctgtgtgggcactcgaagatacggattcttaacgtcgcaagacgaaaaatgaataccaagtctcaagagtgaacacgtaattcattacgaagtttaattctttgagcgtcaaacttttaaactgaagagtttgatcctggctcagattgaacgctagcgggatgctttacacatgcaagtcgaacggcagcgcgagagagcttgctctcttggcggcgagtggcggacgggtgagtaatatatcggaacgtgcccagtagcgggggataactactcgaaagagtggctaataccgcatacgccctacgggggaaagggggggatcgcaagacctctcactattggagcggccgatatcggattagctagttggtggggtaaaggctcaccaaggcaacgatccgtagctggtttgagaggacgaccagccacactgggactgagacacggcccagactcctacgggaggcagcagtggggaattttggacaatgggggaaaccctgatccagccatcccgcgtgtatgatgaaggccttcgggttgtaaagtacttttggcagagaagaaaaggtacctcctaatacgaggtactgctgacggtatctgcagaataagcaccggctaactacgtgccagcagccgcggtaatacgtagggtgcaagcgttaatcggaattactgggcgtaaagcgtgtgtaggcggttcggaaagaaagatgtgaaatcccagggctcaaccttggaactgcatttttaactgccgagctagagtatgtcagaggggggtagaattccacgtgtagcagtgaaatgcgtagatatgtggaggaataccgatggcgaaggcagccccctgggataatactgacgctcagacacgaaagcgtggggagcaaacaggattagataccctggtagtccacgccctaaacgatgtcaactagctgttggggccgttaggccttagtagcgcagctaacgcgtgaagttgaccgcctggggagtacggtcgcaagattaaaactcaaaggaattgacggggacccgcacaagcggtggatgatgtggattaattcgatgcaacgcgaaaaaccttacctacccttgacatgtctggaaagccgaagagatttggccgtgctcgcaagagaaccggaacacaggtgctgcatggctgtcgtcagctcgtgtcgtgagatgttgggttaagtcccgcaacgagcgcaacccttgtcattagttgctacgcaagagcactctaatgagactgccggtgacaaaccggaggaaggtggggatgacgtcaagtcctcatggcccttatgggtagggcttcacacgtcatacaatggtcgggacagagggtcgccaacccgcgagggggagccaatctcagaaacccgatcgtagtccggatcgcagtctgcaactcgactgcgtgaagtcggaatcgctagtaatcgcggatcagaatgtcgcggtgaatacgttcccgggtcttgtacacaccgcccgtcacaccatgggagtgggtttcaccagaagtaggtagcctaaccggtcaacagccgttgtagctaaccagtactaattgcccgtgtggcttgatcctgagagatcaagcgaataagtgcatatgatggatgccttggcgatcacaggcgatgaaggacgcggtagcctgcgaaaagctacggggagctggcaaacaagctttgatccgtagatgtccgaatggggaaacccaccgtagtaatacggtatcccatgctcaatacataggcatgtggaggcgaaccgagtgaactgaaccatctcagtaactcgaggaaaagaaatcaaccgagattccggaagtagtggcgagcgaaaccggaccagcctggatgttttagcgtagtgaatagtcgaatggaatggaaagtccagccgtagcaggtgatagccctgtaggcgaaattcagtacgtggaactaagcatcgaacaagtagggcgggacacgtgaaatcctgtctgaatatggggggaccatcctccaaggctaaatactcgtgatcgaccgatagtgaaccagtaccgtgagggaaaggcgaaaagaaccccggaaggggagtgaaatagatcctgaaatcgtatgcatacaaacagtaggagcaccttcgtggtgtgactgcgtaccttttgtataatgggtcagcgacttacattcagtggcaagcttaaccgaataggggaggcgtagcgaaagcgagtccgaatagggcgattcagtcgctgggtgtagacccgaaaccaggcgatctatccatggccaggttgaaggcacggtaacacgtgctggaggaccgaacccactaatgttgaaaaattaggggatgagctgtggatcggagtgaaaggctaaacaagcctggagatagctggttctctccgaaaactatttaggtagtgcctcgtatattactgccgggggtagagcactgttatggctagggggtcacagcgacttaccaacccatggcaaactccgaataccggcaagtacagtacgggagacagagcaccgggtgctaacgtccggactcaagagggaaacaacccagaccgccagctaaggtccctaactatggctaagtgggaaacgaagtgggaaggcatagacagtcaggaggttggcttagaagcagccatcctttaaagaaagcgtaatagctcactgatcgagtcgtcctgcgcggaagatgtaacggggctaagccatagaccgaagctgcggatgtgtactatgtacacatggtaggagagcgttccgtaagcctgtgaaggtgttccgtgaggaatgctggaggtatcggaagtgagaatgctgacatgagtagcgataaagggggtgaaaagccccctcgccgtaagtccaaggtttcctgcgcaacgttcatcggcgcagggtgagtcggcccctaaggcgaggcagagatgcgtagctgatgggaagcgggttaatattcccgcaccgtcgtagagtgcgatggggggacggattgcagaatgttatcggggtgttggatgtccccgttggcgcatcatagaaggcacttaggcaaatccgggtgcgtaattcaagggtgtgactggatagagcttcggctctaaactaactggaagcagttccaagaaaagcctctaagcttcagctctacgagaccgtaccgcaaaccgacacaggtggacgggatgaatattccaaggcgcttgagagaactcaggagaaggaactcggcaaattaataccgtaacttcgggagaaggtatgcctcattagtgtgatgtgcctgcgcacaaagcatgaagaggccgcagtgaatcggtggctgcgactgtttactaaaaacacagcactctgcaaacacgaaagtggacgtatagggtgtgacgcctgcccggtgccggaaggttaagtgatggggtgcaagctcttgatcgaagccccggtaaacggcggccgtaactataacggtcctaaggtagcgaaattccttgtcgggtaagttccgacctgcacgaatggcgtaacgatggccacactgtctcctcctgagactcagcgaagttgacatggttgtgatgatgcaatctccccgcggctagacggaaagaccccatgaacctttactgtagctttgcattggattgtgaaccggcctgtgtaggataggtgggagacgttgaagcgtggtcgccagatcgcgtggagtcatccttgaaataccaccctggtctgtttgcggttctaacctaggtcccttatcgggatcggggaccgtgcatggtgggcagtttgactggggcggtctcctcctaaagtgtaacggaggagttcgaaggtacgctagagacggtcggaaatcgtcttgatagtgcaatggcataagcgtgcttgactgtgagactgacaagtcgaacaggtacgaaagtaggacatagtgatccggtggttctgtatggaagggccatcgctcaacggataaaaggtactctggggataacaggctgataccgcccaagagttcatatcgacggcggtgtttggcacctcgatgtcggctcatctcatcctggggctgtagccggtcccaagggtatggctgttcgccatttaaagaggtacgtgagctgggtttaaaacgtcgtgagacagtttggtccctatctgccgtgggcgttggatatttgacggagcctgctcctagtacgagaggaccggagtggacgtaccactggtgtatcggttgtcatgccaatggcattgccgagtagctacgtacggaagagataaccgctgaaggcatctaagcgggaaactcgtctgaagattagatatcccggaggcttgacctccctgtagggtcgtccgagaccaggacgttgataggctgggtgtggaagtgcagtaatgcatacggacatggttgtaaggagggcgcttaccacggtgggattcatgactggggtgaagtcgtaacaaggtagccgtatcggaaggtgcggctggatcatgtggtttccttaaagaagcgtactttgtagtgctcacacagattgtctgatagaaagtgaaaagcaaggcgtttacgcgttgggagtgaggctgaagagaataaggccgttcgctttctattaatgaaagctcaccctacacgaaaatatcacgcaacgcgtgataagcaattttcgtgtccccttcgtctagaggcccaggacaccgccctttcacggcggtaacaggggttcgaatcccctaggggacgccacttgctggtttgtgagtgaaagtcgccgaccttaatatctcaaaactcatcttcgggtgatgtttgagatatttgctctttaaaaatctggatcaagctgaaaattgaaacactgaacaacgagagttgttcgtgagtctctcaaattttcgcaacacgatgatgaatcgaaaggcggatgagagaagattttcagcctgatacagattaaatcagaacgcagaagcggtctgataaaacagaatttgcttggcgaccatagcgttttggacccacctgactccatcccgaactcagaagtgaaacgaaacagcgtcgatggtagtgtggggtctccccatgtgagagtagaacatcgccaggcttcaaataaaacgaaaggctcagtcgaaagactgggcctttcgttttatctgttgtttgtcggtgaacgctctcctgagtaggacaaatccgccgggagcggatttgaacgttgcgaagcaacggcccggagggtggcgggcaggacgcccgccataaactgccaggcatcaaattaagcagaaggccatcctgacggatggcctttttgcgtttctacaaactcttcctgtcgtcatatctacaagccggcgcgccgggaaatgtgcgcggaacccctatttgtttatttttctaaatacattcaaatatgtatccgctcatgagacaataaccctgataaatgcttcaataatattgaaaaaggaagagtatgagtattcaacatttccgtgtcgcccttattcccttttttgcggcattttgccttcctgtttttgctcacccagaaacgctggtgaaagtaaaagatgctgaagatcagttgggtgcacgagtgggttacatcgaactggatctcaacagcggtaagatccttgagagttttcgccccgaagaacgttttccaatgatgagcacttttaaagttctgctatgtggcgcggtattatcccgtgttgacgccgggcaagagcaactcggtcgccgcatacactattctcagaatgacttggttgagtactcaccagtcacagaaaagcatcttacggatggcatgacagtaagagaattatgcagtgctgcaataaccatgagtgataacactgcggccaacttacttctgacaacgatcggaggaccgaaggagctaaccgcttttttgcacaacatgggggatcatgtaactcgccttgatcgttgggaaccggagctgaatgaagccataccaaacgacgagcgtgacaccacgatgcctgcagcaatggcaacaacgttgcgcaaactattaactggcgaactacttactctagcttcccggcaacaattaatagactggatggaggcggataaagttgcaggaccacttctgcgctcggcccttccggctagctggtttattgctgataaatctggagccggtgagcgtgggtctcgcggtatcattgcagcactggggccagatggtaagccctcccgtatcgtagttatctacacgacggggagtcaggcaactatggatgaacgaaatagacagatcgctgagataggtgcctcactgattaagcattggtaactgcagaccaagtttactcatatatactttagattgatttaaaacttcatttttaatttaaaaggatctaggtgaagatcctttttgataatctcatgaccaaaatcccttaacgtgagttttcgttccactgagcgtcagaccccgtagaaaagatcaaaggatcttcttgagatcctttttttctgcgcgtaatctgctgcttgcaaacaaaaaaaccaccgctaccagcggtggtttgtttgccggatcaagagctaccaactctttttccgaaggtaactggcttcagcagagcgcagataccaaatactgtccttctagtgtagccgtagttaggccaccacttcaagaactctgtagcaccgcctacatacctcgctctgctaatcctgttaccagtggctgctgccagtggcgataagtcgtgtcttaccgggttggactcaagacgatagttaccggataaggcgcagcggtcgggctgaacggggggttcgtgcacacagcccagcttggagcgaacgacctacaccgaactgagatacctacagcgtgagctatgagaaagcgccacgcttcccgaagggagaaaggcggacaggtatccggtaagcggcagggtcggaacaggagagcgcacgagggagcttccagggggaaacgcctggtatctttatagtcctgtcgggtttcgccacctctgacttgagcgtcgatttttgtgatgctcgtcaggggggcggagcctatggaaaaacgccagcaacgcggcctttttacggttcctggccttttgctgg

SEQ ID NO: 360 - DNA, 7360 bp, Artificial
  Synthetic
agacttagggaccctgcggccgccattaattcctaatttttgttgacactctatcattgatagagttattttaccactccctatcagtgatagagaaaagtgaaatgaatagaccggccgctgagaaaaagcgaagcggcactgctctttaacaatttatcagacaatctgtgtgggcactcgaagatacggattcttaacgtcgcaagacgaaaaatgaataccaagtctcaagagtgaacacgtaattcattacgaagtttaattctttgagcgtcaaacttttgaactgaagagtttgatcctggctcagattgaacgctggcggcatgccttacacatgcaagtcgaacggcagcacgggtgcttgcacctggtggcgagtggcgaacgggtgagtaatacatcggaacatgtcctgtagtgggggatagcccggcgaaagccggattaataccgcatacgatccatggatgaaagcgggggaccttcgggcctcgcgctatagggttggccgatggctgattagctagttggtggggtaaaggcctaccaaggcgacgatcagtagctggtctgagaggacgaccagccacactgggactgagacacggcccagactcctacgggaggcagcagtggggaattttggacaatgggcgaaagcctgatccagcaatgccgcgtgtgtgaagaaggccttcgggttgtaaagcacttttgtccggaaagaaatccttggctctaatacagtcgggggatgacggtaccggaagaataagcaccggctaactacgtgccagcagccgcggtaatacgtagggtgcgagcgttaatcggaattactgggcgtaaagcgtgcgcaggcggtttgctaagaccgatgtgaaatccccgggctcaacctgggaactgcattggtgactggcaggctagagtatggcagaggggggtagaattccacgtgtagcagtgaaatgcgtagagatgtggaggaataccgatggcgaaggcagccccctgggccaatactgacgctcatgcacgaaagcgtggggagcaaacaggattagataccctggtagtccacgccctaaacgatgtcaactagttgttggggattcatttccttagtaacgtagctaacgcgtgaagttgaccgcctggggagtacggtcgcaagattaaaactcaaaggaattgacggggacccgcacaagcggtggatgatgtggattaattcgatgcaacgcgaaaaaccttacctacccttgacatggtcggaatcctgctgagaggtgggagtgctcgaaagagaaccggcgcacaggtgctgcatggctgtcgtcagctcgtgtcgtgagatgttgggttaagtcccgcaacgagcgcaacccttgtccttagttgctacgcaagagcactctaaggagactgccggtgacaaaccggaggaaggtggggatgacgtcaagtcctcatggcccttatgggtagggcttcacacgtcatacaatggtcggaacagagggttgccaacccgcgagggggagctaatcccagaaaaccgatcgtagtccggattgcactctgcaactcgagtgcatgaagctggaatcgctagtaatcgcggatcagcatgccgcggtgaatacgttcccgggtcttgtacacaccgcccgtcacaccatgggagtgggttttaccagaagtggctagtctaaccggtcaacagccgtttcagctaactgatactaattgcccgtaaggcttgatcctgagaggtcaagcgaacaagtgcatgtggtggatgccttggcgatcacaggcgatgaaggacgcggtagcctgcgaaaagctacggggagctggcaaacgagctttgatccgtagatgtccgaatggggaaacccactccttttggagtatccatggctgaatacataggccatgcgaagcgaacgcggtgaactgaaacatctaagtaaccgcaggaaaagaaatcaaccgagattcccaaagtagtggcgagcgaaatgggatgagccttgcactctttatttgtattgttagccgaacgctctggaaagtgcggccatagcaggtgatagccctgtaggcgaaaacagtatgaaagaactaggtgtgcgacaagtagggcgggacacgtgaaatcctgtctgaagatggggggaccatcctccaaggctaaatactcgtgatcgaccgatagtgaaccagtaccgtgagggaaaggcgaaaagaaccccgggaggggagtgaaatagatcctgaaaccgcatgcatacaaacagtcggagcctcgtaaggggtgacggcgtaccttttgtataatgggtcagcgacttacgttcagtagcaagcttaaccgtatagggcaggcgtagcgaaagcgagtccgaatagggcgttcagttgctgggcgtagacccgaaaccaggtgatctatccatggccaggatgaaggtgcggtaacacgtactggaggtccgaacccactaacgttgaaaagttaggggatgagctgtggataggggtgaaaggctaaacaaacctggaaatagctggttctctccgaaaactatttaggtagtgcctcgtgtctcaccttcgggggtagagcactgtcatggttggggggtctattgcagattaccccgccatagcaaactccgaataccgaagagtgcaatcacgggagacagacatcgggtgctaacgtccggtgtcaagagggaaacaacccagaccgccagctaaggtccccaaatatagctaagtgggaaacgaagtgggaaggctaaaacagtcaggaggttggcttagaagcagccaccctttaaagaaagcgtaatagctcactgatcgagtcgtcctgcgcggaagatgtaacggggctaagctatataccgaagctgcggatgcgagcttgctcgcatggtaggagagcgttccgtaagcctgcgaaggtgccttgtaaagggtgctggaggtatcggaagtgcgaatgctgacatgagtagcgataaagggggtgaaaggccccctcgccgtaagcccaaggtttcctacgcaacgttcatcggcgtagggtgagtcggcccctaaggcgaggcagaaatgcgtagctgatgggaagcaggtcaatattcctgcaccattgttagatgcgatggggggacggatcgcggaaggttgtccgggtgttggaagtcccggtcgctgcattggagaaggcgcttaggcaaatccgggcgcgtaattcaagggtgtggcgcgagctccttagggagcgaagcaattggaagtggttccaagaaaagcctctaagcttcagtctaacgatgaccgtaccgcaaaccgacacaggtgggcgagatgagtattctaaggcgcttgagagaactcgggagaaggaactcggcaaattggtaccgtaacttcgggataaggtacgcccttgtagcttgactggcctgcgccaggagggtgaaggggttgcaataaactggtggctgcgactgtttaataaaaacacagcactctgcaaacacgaaagtggacgtatagggtgtgacgcctgcccggtgccggaagattaaatgatggggtgcaagctcttgattgaagtcccggtaaacggcggccgtaactataacggtcctaaggtagcgaaattccttgtcgggtaagttccgacctgcacgaatggcgtaacgatggccacactgtctcctcccgagactcagcgaagttgaagtgtttgtgatgatgcaatctacccgcggctagacggaaagaccccatgaacctttactgtagctttgcattggactttgaaccgatctgtgtaggataggtgggaggctatgaagccggaacgctagtttcggtggagccgtccttgaaataccaccctggtttgtttgaggttctaaccttggcccgtgatccgggtcggggacagtgcatggtaggcagtttgactggggcggtctcctcccaaagcgtaacggaggagtacgaaggtacgctaggtacggtcggaaatcgtgctgatagtgcaatggcataagcgtgcttaactgcgagaccgacaagtcgagcaggtgcgaaagcaggtcatagtgatccggtggttctgtatggaagggccatcgctcaacggataaaaggtactctggggataacaggctgataccgcccaagagttcatatcgacggcggtgtttggcacctcgatgtcggctcatctcatcctggggctgtagccggtcccaagggtatggctgttcgccatttaaagaggtacgtgagctgggtttaaaacgtcgtgagacagtttggtccctatctgccgtgggcgttggatatttgaagggggctgctcctagtacgagaggaccggagtggacgaacctctggtgtaccggttgtcacgccagtggcatcgccgggtagctatgttcggaagagataaccgctgaaagcatctaagcgggaaactcgccttaagatgagatatccctggggactagatccccttgaagggtcgttcgagaccaggacgttgataggtcaggtgtgtaaacggacatggttgcaaggaggacggtcaccacggtaggattcatgactggggtgaagtcgtaacaaggtagccgtatcggaaggtgcggctggatcatgtggtttccttaaagaagcgtactttgtagtgctcacacagattgtctgatagaaagtgaaaagcaaggcgtttacgcgttgggagtgaggctgaagagaataaggccgttcgctttctattaatgaaagctcaccctacacgaaaatatcacgcaacgcgtgataagcaattttcgtgtccccttcgtctagaggcccaggacaccgccctttcacggcggtaacaggggttcgaatcccctaggggacgccacttgctggtttgtgagtgaaagtcgccgaccttaatatctcaaaactcatcttcgggtgatgtttgagatatttgctctttaaaaatctggatcaagctgaaaattgaaacactgaacaacgagagttgttcgtgagtctctcaaattttcgcaacacgatgatgaatcgaaaggcggatgagagaagattttcagcctgatacagattaaatcagaacgcagaagcggtctgataaaacagaatttgcctgatgaccatagcgagtcggtcccaccccttcccatcccgaacaggaccgtgaaacgactctacgccgatgatagtgcggattcccgtgtgaaagtaggtaatcgtcaggctccaaataaaacgaaaggctcagtcgaaagactgggcctttcgttttatctgttgtttgtcggtgaacgctctcctgagtaggacaaatccgccgggagcggatttgaacgttgcgaagcaacggcccggagggtggcgggcaggacgcccgccataaactgccaggcatcaaattaagcagaaggccatcctgacggatggcctttttgcgtttctacaaactcttcctgtcgtcatatctacaagccggcgcgccgggaaatgtgcgcggaacccctatttgtttatttttctaaatacattcaaatatgtatccgctcatgagacaataaccctgataaatgcttcaataatattgaaaaaggaagagtatgagtattcaacatttccgtgtcgcccttattcccttttttgcggcattttgccttcctgtttttgctcacccagaaacgctggtgaaagtaaaagatgctgaagatcagttgggtgcacgagtgggttacatcgaactggatctcaacagcggtaagatccttgagagttttcgccccgaagaacgttttccaatgatgagcacttttaaagttctgctatgtggcgcggtattatcccgtgttgacgccgggcaagagcaactcggtcgccgcatacactattctcagaatgacttggttgagtactcaccagtcacagaaaagcatcttacggatggcatgacagtaagagaattatgcagtgctgcaataaccatgagtgataacactgcggccaacttacttctgacaacgatcggaggaccgaaggagctaaccgcttttttgcacaacatgggggatcatgtaactcgccttgatcgttgggaaccggagctgaatgaagccataccaaacgacgagcgtgacaccacgatgcctgcagcaatggcaacaacgttgcgcaaactattaactggcgaactacttactctagcttcccggcaacaattaatagactggatggaggcggataaagttgcaggaccacttctgcgctcggcccttccggctagctggtttattgctgataaatctggagccggtgagcgtgggtctcgcggtatcattgcagcactggggccagatggtaagccctcccgtatcgtagttatctacacgacggggagtcaggcaactatggatgaacgaaatagacagatcgctgagataggtgcctcactgattaagcattggtaactgcagaccaagtttactcatatatactttagattgatttaaaacttcatttttaatttaaaaggatctaggtgaagatcctttttgataatctcatgaccaaaatcccttaacgtgagttttcgttccactgagcgtcagaccccgtagaaaagatcaaaggatcttcttgagatcctttttttctgcgcgtaatctgctgcttgcaaacaaaaaaaccaccgctaccagcggtggtttgtttgccggatcaagagctaccaactctttttccgaaggtaactggcttcagcagagcgcagataccaaatactgtccttctagtgtagccgtagttaggccaccacttcaagaactctgtagcaccgcctacatacctcgctctgctaatcctgttaccagtggctgctgccagtggcgataagtcgtgtcttaccgggttggactcaagacgatagttaccggataaggcgcagcggtcgggctgaacggggggttcgtgcacacagcccagcttggagcgaacgacctacaccgaactgagatacctacagcgtgagctatgagaaagcgccacgcttcccgaagggagaaaggcggacaggtatccggtaagcggcagggtcggaacaggagagcgcacgagggagcttccagggggaaacgcctggtatctttatagtcctgtcgggtttcgccacctctgacttgagcgtcgatttttgtgatgctcgtcaggggggcggagcctatggaaaaacgccagcaacgcggcctttttacggttcctggccttttgctgg

SEQ ID NO: 361 - DNA, 7440 bp, Artificial
  Synthetic
agacttagggaccctgcggccgccattaattcctaatttttgttgacactctatcattgatagagttattttaccactccctatcagtgatagagaaaagtgaaatgaatagaccggccgctgagaaaaagcgaagcggcactgctctttaacaatttatcagacaatctgtgtgggcactcgaagatacggattcttaacgtcgcaagacgaaaaatgaataccaagtctcaagagtgaacacgtaattcattacgaagtttaattctttgagcgtcaaacttttggagagtttgatcctggctcagaacgaacgctggcggcgtgcctaacacatgcaagtcgaacggactttaagacttcggttttaaagttagtggcgcacgggtgagtaacgcgtggatatctgcctatcagtgggggacaactacaggaaactgtagctaataccgcatacgctgtacgcaggaaagcgggggatcttcggacctcgcgctgatagatgagtccgcgtctgattagctagttggtggggtaaaggcctaccaaggcgatgatcagtaactggtttgagaggatgatcagtcacactggaactgagacacggtccagactcctacgggaggcagcagtggggaatattgcacaatgggggaaaccctgatgcagcgacgccgcgtgcgggaagaaggccttcgggttgtaaaccgctttcaattgggaagaagagatgagtactaatactgctctgatttgacggtacctttagaagaagcaccggctaatttcgtgccagcagccgcggtaatacgaaaggtgcaagcgttgttcggatttactgggcgtaaagagatcgtaggtggtttgttaagtcggatgtgaaatcccagggctcaaccctggaactgcattcgatactggcagactagagtttgggaggggtaagcggaattccgtgtgtagcagtgaaatgcgtagatatacggaggaacacctgaggcgaaggcggcttactggaccaatactgacactgaggatcgaaagcgtgggtagcaaacaggattagataccctggtagtccacgccctaaacgatgtcaactagccgtagcgggtatcgacccctgctgtggcgaagctaacgcgataagttgaccgcctggggagtacggtcgcaagattaaaactcaaaggaattgacgggggcccgcacaagcggtggagcatgtggtttaattcgacgcaacgcgaagaaccttacctgggtttgacatcctaagaatactttagagatagagtagtgccttcgggagcttagagacaggtgctgcatggctgtcgtcagctcgtgtcgtgagatgttgggttaagtcccgcaacgagcgcaacccctatcgttagttgccatcatttagttgggcactctagcgagactgccggtgacaaaccggaggaaggtggggacgacgtcaagtcatcatggcccttatgtccagggctacacacgtgctacaatggcgactacaacaagttgcgaacccgcgagggggagccaatcttataaaagtcgtctcagttcggattggagtctgcaactcgactccatgaagttggaatcgctagtaatcgcggatcagcatgccgcggtgaatacgttcccgggccttgtacacaccgcccgtcacaccatgggaattggttgcaccagaagccgccgggctaaccggtcaacagccgttggagctgaccagtactaattgcccgtgcggcttaaccatgagaggttaagtgaataagggtccatgggggatgccttggcgctgagcggcgatgaaagacgtgactacctgcgaaaagtttcggggagctggtaagtgagctttgatccggaaatatctgaatggggaaacccggcagtttcgactgtcacctgcagctgaatacataggctgtatggagcgaacgcggagaattgaaacatcttagtacccgcaggaaaagaaatctatgagattccctgagtagcggcgagcgaaacgggaaaaggccaaaccggtaaatttatttgccggggttgtaggactacaatatggtattgataagagatagcagaacactctggaaagtgtggccatagtgggtgatagccccgtatgcgaaatttcgagtcaacctagtagcatcctgagtaggacgggacacgagaaaccttgtctgaatccggggggaccaccctccaagcctaaatacgtctcagcgaccgatagtgaaccagtaccgtgagggaaaggtgaaaagtaccccgttgaggggagtgaaatagacctgaaaccatggacctacaagcagttggagccctatgtcttcggacagggtgacagcgtaccttttgtataatgggccaacgacttatggctcagtggcaaggttaagttattaaacgaagccgtagcgaaagcgagtcttaatagggcgcacatagtcactgggcatagacccgaagccaggcgagctatttatgagcaggttgaagcggtggtaagacatcgtggaggaccgaacccacattggctgaagacaatggggatgacttgtgaataggggtgaaaggccaatcaagcctggcaatagctggttctctccgaaagctatttaggtagcgcctcatgtatcaccaccgggggtagagcactggatgggctagggggtctcacgacttaccaaacctaaccaaactccgaataccggtgagtgcaatcatgggagacagactttggatgctaacgtccatggtcaagagggaaacaacccagaccgtcagctaaggtccccaaatgtatgttaagtggtaaacgaagtggaaaggcaataacagccaggaggttagcttagaagcagctatcctttaaagaaagcgtaatagctcactggtcgagtcggtctgcgcggaagatataacggggctcaaacatactaccgaagctacgggtgcagtttactgcacggtaggagagcgttctgtaagcctgtgaagcgatactgtaaggagtcgtggaggtatcagaagtgagaatgttggcataagtagcgataaaacgggtgaaaaacccgttcaccgaaagcccaaggtttcctgcaccatgctaatcagggcagggttagtcggcccctaaggcgaggcagaaatgcgtagtcgatgggaaacaggttaatattcctgtaccgactttagatgcgatggagggacggagaaaggtagctgatccgggcgatggttgtcccggttcaagcgcgtagggagagagttttggcaaatccggactctcattatcctgagacgttatgacgtgctcttacttcggtttgagcgaagtcagtgatcctatgcttccaagaaaatcttctaagcttcagtctaaagttgaccgtaccgtaaaccgacacaggtaggcgaggcgagaagcctaaggtgcttgagataactctggttaaggaactcggcaaattggccccgtaacttcgggagaaggggtgccctttttatgtgaagcgacttgctcgtggagcagaagggggttgcagtgaccagggggtagcgactgtttactaaaaacacagcactctgctaagccgtaaggcgatgtatagggtgtgacgcctgcccggtgctggaaggttaagaggtggggttagcgcaagcgaagctctgaatcgaagccccagtaaacggcggccgtaactataacggtcctaaggtagcgaaattccttgtcgggtaagttccgacctgcacgaatggcgtaacgacttccccactgtctcaaccagagactcagcgaaattgaactcgcagtgaagatgctgcgttcccgcggctagacggaaagaccccgtgcacctttactacagcttgacattggatctaggtatattttgtgcaggataggtgggaggctttgatatggtgacgccagttaccatggagccacccttgagataccaccctgaatatgcttgggttctaaccaaggcccgttatccgggtttgggacattgtctggtgggtagtttgactggggcggtcgcctcctaaagagtaacggaggcgcgcgaagtttcactcaggttggtcggaaatcaaccattgagcgcaagagtataagtgagactgactgcgagactgacaagtcgagcagggacgaaagtcggttctagtgatccggtggttccgagtggaagggccatcgctcaacggataaaaggtacgccggggataacaggctgattccccccaagagttcatatcgacgggggagtttggcacctcgatgtcggctcatcacatcctggggctggagcaggtcccaagggttcggctgttcgccgattaaagtggtacgtgagctgggtttagaacgtcgtgagacagttcggtccctatctaccgtgggcgttggagaattgagaggatctgtccttagtacgagaggaccgggatggacaaacctctggtgttcctgttgttctgccaagagcattgcagggtagctacgtttggaacggataaccgctgaaggcatctaagcgggaagccggcctcaagataaattctcccggagctttaagctccctgaagggccgtggaagactaccacgttgataggctgggtgtggaagtgcagcaatgcatacggacatggttttcgggaggcaggcgtctacggtgtggtcggtaactggggtgaagtcgtaacaaggtatccctaccggaaggtggggatggatcatgtggtttccttaaagaagcgtactttgtagtgctcacacagattgtctgatagaaagtgaaaagcaaggcgtttacgcgttgggagtgaggctgaagagaataaggccgttcgctttctattaatgaaagctcaccctacacgaaaatatcacgcaacgcgtgataagcaattttcgtgtccccttcgtctagaggcccaggacaccgccctttcacggcggtaacaggggttcgaatcccctaggggacgccacttgctggtttgtgagtgaaagtcgccgaccttaatatctcaaaactcatcttcgggtgatgtttgagatatttgctctttaaaaatctggatcaagctgaaaattgaaacactgaacaacgagagttgttcgtgagtctctcaaattttcgcaacacgatgatgaatcgaaaggcggatgagagaagattttcagcctgatacagattaaatcagaacgcagaagcggtctgataaaacagaattttcctggtgttcatagcaaagaggaaacgcctgatcccatcccgaactcagaagctaagctcttttgcgccaatggtactgtagcgttcgttacgggagagtaggtcaatgccaggaatcaaataaaacgaaaggctcagtcgaaagactgggcctttcgttttatctgttgtttgtcggtgaacgctctcctgagtaggacaaatccgccgggagcggatttgaacgttgcgaagcaacggcccggagggtggcgggcaggacgcccgccataaactgccaggcatcaaattaagcagaaggccatcctgacggatggcctttttgcgtttctacaaactcttcctgtcgtcatatctacaagccggcgcgccgggaaatgtgcgcggaacccctatttgtttatttttctaaatacattcaaatatgtatccgctcatgagacaataaccctgataaatgcttcaataatattgaaaaaggaagagtatgagtattcaacatttccgtgtcgcccttattcccttttttgcggcattttgccttcctgtttttgctcacccagaaacgctggtgaaagtaaaagatgctgaagatcagttgggtgcacgagtgggttacatcgaactggatctcaacagcggtaagatccttgagagttttcgccccgaagaacgttttccaatgatgagcacttttaaagttctgctatgtggcgcggtattatcccgtgttgacgccgggcaagagcaactcggtcgccgcatacactattctcagaatgacttggttgagtactcaccagtcacagaaaagcatcttacggatggcatgacagtaagagaattatgcagtgctgcaataaccatgagtgataacactgcggccaacttacttctgacaacgatcggaggaccgaaggagctaaccgcttttttgcacaacatgggggatcatgtaactcgccttgatcgttgggaaccggagctgaatgaagccataccaaacgacgagcgtgacaccacgatgcctgcagcaatggcaacaacgttgcgcaaactattaactggcgaactacttactctagcttcccggcaacaattaatagactggatggaggcggataaagttgcaggaccacttctgcgctcggcccttccggctagctggtttattgctgataaatctggagccggtgagcgtgggtctcgcggtatcattgcagcactggggccagatggtaagccctcccgtatcgtagttatctacacgacggggagtcaggcaactatggatgaacgaaatagacagatcgctgagataggtgcctcactgattaagcattggtaactgcagaccaagtttactcatatatactttagattgatttaaaacttcatttttaatttaaaaggatctaggtgaagatcctttttgataatctcatgaccaaaatcccttaacgtgagttttcgttccactgagcgtcagaccccgtagaaaagatcaaaggatcttcttgagatcctttttttctgcgcgtaatctgctgcttgcaaacaaaaaaaccaccgctaccagcggtggtttgtttgccggatcaagagctaccaactctttttccgaaggtaactggcttcagcagagcgcagataccaaatactgtccttctagtgtagccgtagttaggccaccacttcaagaactctgtagcaccgcctacatacctcgctctgctaatcctgttaccagtggctgctgccagtggcgataagtcgtgtcttaccgggttggactcaagacgatagttaccggataaggcgcagcggtcgggctgaacggggggttcgtgcacacagcccagcttggagcgaacgacctacaccgaactgagatacctacagcgtgagctatgagaaagcgccacgcttcccgaagggagaaaggcggacaggtatccggtaagcggcagggtcggaacaggagagcgcacgagggagcttccagggggaaacgcctggtatctttatagtcctgtcgggtttcgccacctctgacttgagcgtcgatttttgtgatgctcgtcaggggggcggagcctatggaaaaacgccagcaacgcggcctttttacggttcctggccttttgctgg

SEQ ID NO: 362 - DNA, 7235 bp, Artificial
  Synthetic
agacttagggaccctgcggccgccattaattcctaatttttgttgacactctatcattgatagagttattttaccactccctatcagtgatagagaaaagtgaaatgaatagaccggccgctgagaaaaagcgaagcggcactgctctttaacaatttatcagacaatctgtgtgggcactcgaagatacggattcttaacgtcgcaagacgaaaaatgaataccaagtctcaagagtgaacacgtaattcattacgaagtttaattctttgagcgtcaaacttttcaacctgagagtttgatcctggctcagagcgaacgctggcggcaggcctaacacatgcaagtcgaacggatccttcgggattagtggcggacgggtgagtaacacgtgggaacgtgccctttggttcggaacaactcagggaaacttgagctaataccggatgtgcccttcgggggaaagatttatcgccattggagcggcccgcgtctgattagctagttggtgaggtaaaggctcaccaaggcgacgatcagtagctggtctgagaggatgatcagccacattgggactgagacacggcccaaactcctacgggaggcagcagtggggaatcttgcgcaatgggcgaaagcctgacgcagccatgccgcgtgaatgatgaaggtcttaggattgtaaaattctttcaccggggacgataatgacggtacccggagaagaagccccggctaacttcgtgccagcagccgcggtaatacgaagggggctagcgttgctcggaattactgggcgtaaagggagcgtaggcggactgtttagtcagaggtgaaagcccagggctcaaccttggaattgcctttgatactggcagtcttgagtacggaagaggtatgtggaactccgagtgtagaggtgaaattcgtagatattcggaagaacaccagtggcgaaggcgacatactggtccgttactgacgctgaggctcgaaagcgtggggagcaaacaggattagataccctggtagtccacgccgtaaacgatgagtgctagttgtcggcatgcatgcatgtcggtgacgcagctaacgcattaagcactccgcctggggagtacggtcgcaagattaaaactcaaaggaattgacgggggcccgcacaagcggtggagcatgtggtttaattcgaagcaacgcgcagaaccttaccaccttttgacatgcctggaccgccacagagatgtggttttcccttcggggactgggacacaggtgctgcatggctgtcgtcagctcgtgtcgtgagatgttgggttaagtcccgcaacgagcgcaaccctcgtgattagttgccatcaggtttggctgggcactctaatcatactgccggagttaatccggaggaaggcggggatgacgtcaagtcctcatggcccttacaaggtgggctacacacgtgctacaatggcgactacagagggctgcaatcccgcgagggggagccaatccctaaaagtcgtctcagttcggattgttctctgcaactcgagagcatgaagttggaatcgctagtaatcgcggatcagcatgccgcggtgaatacgttcccgggccttgtacacaccgcccgtcacaccatgggagttggctttacccgaaggcgctgcgctaaccggtcaacagccgttggagcttaccggtactaatagctcgataggcttgatcgtgagagatcaagcgcataagggcttctgacggatgccttggcattgagaggcgatgaaggacgtggcacgctgcgataagagccggggaggcgcgagcaccctttgatccggctatctccgaatggggaaacccacctttatggtcacccgactttgtttccgcttcggcggagacgacgatcggttgatcagacaaggtataatgacctgaatacatagggttcattaagcaaacccggggaactgaaacatctcagtacccggaggaaaggacatcaaccgagactcccgtagtagtggcgagcgaaccgggaccaggccagtgctgtcgtgacataaagctgaatgtgttgggaaacacagccatagtgggtgatagccccgtaagcgtcaaatagcgacagactcgagtagggcgggacacgtgaaatcctgtctgaacatggggggaccaccctccaagcctaagtactcctcaatgaccgatagcgaacaagtaccgtgagggaaaggtgaaaagcaccccgacaaggggagtgaaacagaacctgaaatcggaagcctacaagcagtcggagccaccgcgcgtggtgacggcgtaccttttgtataatgggtcagcgacttcatgtgccgtgcaagcttaagccgttaggtgtaggcgcagcgaaagcgagtctgaatagggcgaataagtacgtcgcatgacgacccgaaaccaggtgatctatccatgagcaggttgaaggtaaggtaacacttactggaggaccgaaccggtgaatgttgaaaaattctcggatgacttgtggataggggtgaaaggccaatcaaacctggacatagctggttctccgcgaaaactatttaggtagtgcctcggacgaattccttggggggtagagcactgaatggatgcgggcggcgcgagctgtaccaattctaatcaaactccgaatacccaagagaaatatccgggagacacacggcgggtgctaacgtccgtcgtgaaaagggaaacaaccctaaccatcatctaaggcccccaagtactggctaagtgggaaacgatgtgggtttgctttgacaaccaggatgttggcttagaagcagccatcatttaaagaaagcgtaacagctcactggtcaagcgaacctgcgcggaaaatgtaacggggctaaagccagtcgccgaaggtatgggtgtgcactctgtgcacgcggtagcggagcgttccgtaagccgatgaaggtgaggcgtgagccttgctggaggtatcggaagtgagaatgctgacatgagtagcgataaagagggtgagagaccctctcgccgaaagcccaagggttcctgcgtaaagctaatctgcgcagggttagtcggcccctaaggcgaggccgaaaggcgtagtcgatgggaatcaggtgaatattcctgaaccagttggaagtgacggatctggtaaattgtcagggcttattggattgctcctggcagtgaacaggtccctggaaataactccaacggagaccgtacccgaaaccgacacaggtgggcaggtagagtataccaaggcgcttgagagaactatgctgaaggaactcggcaaattgcacgcgtaacttcgggataagcgtgactctcttttgggcaaccagatgagagtggcacaagccagggggtagcgactgtttatcaaaaacacagggctctgcgaagccgcaaggcgacgtatagggtctgacgcctgcccggtgcctgaaggttaaaaggaggggtgcaagctctgaattgaagcccaggtaaacggcggccgtaactataacggtcctaaggtagcgaaattccttgtcgggtaagttccgacctgcacgaatggcgtaacgacttccccactgtctccagcataggctcagcgaaattgaattccccgtgaagatgcggggttcccgcggtcagacggaaagaccctatgaacctttactgcagcttcgccttggcgttagcagcaacatgtgtaggataggtgggaggctatgaaactcgggcgccagttcgagtggagccatccttgaaataccacccttattgttgctgacgtctaaccgcggcccgttatccgggtccgggacatggcgtggcgggcagtttgactggggcggtcgcctcccaaagtgtaacggaggcgcgcgatggtgggctcagaccggtcggaaatcggtcgtcgagtgcaatggcataagcccgcctgactgcgagactgacaagtcgagcagagacgaaagtcggccatagtgatccggtggtcctgcgtggaagggccatcgctcaacgaataaaaggtactctagggataacaggctgattttgcccaagagtccatatcgacggcaaagtttggcacctcgatgtcggctcatcacatcctggggctggagcaggtcccaagggttcggctgttcgccgattaaagtggtacgtgagctgggttcagaacgtcgtgagacagtttggtccctatctgccgtgggtgtacgagacttgagaggatctgtccctagtacgagaggaccgggatggacacacctctggtggacctgtcatggcgccagctgtgcagcagggtagctaagtgtggaatagataaccgctgaaagcatctaagcgggaaactaacctcaaaacaaggtctcgctgagagccgtggaagaccaccacgttgataggccgggtgtggaagtgcggtgacgcatacggacatggttgcaagggggcaggcgaccacggtagggtcagcgactggggtgaagtcgtaacaaggtagccgtaggggaacctgcggctggatcatgtggtttccttaaagaagcgtactttgtagtgctcacacagattgtctgatagaaagtgaaaagcaaggcgtttacgcgttgggagtgaggctgaagagaataaggccgttcgctttctattaatgaaagctcaccctacacgaaaatatcacgcaacgcgtgataagcaattttcgtgtccccttcgtctagaggcccaggacaccgccctttcacggcggtaacaggggttcgaatcccctaggggacgccacttgctggtttgtgagtgaaagtcgccgaccttaatatctcaaaactcatcttcgggtgatgtttgagatatttgctctttaaaaatctggatcaagctgaaaattgaaacactgaacaacgagagttgttcgtgagtctctcaaattttcgcaacacgatgatgaatcgaaaggcggatgagagaagattttcagcctgatacagattaaatcagaacgcagaagcggtctgataaaacagaattgacctggtggctatgccgggggttccccacccgatcccattccgaactcggtcgttaagtccccctgggccaatggtacttcgtctcaaggcgcgggagagtaggtcgccgccaggtcccaaataaaacgaaaggctcagtcgaaagactgggcctttcgttttatctgttgtttgtcggtgaacgctctcctgagtaggacaaatccgccgggagcggatttgaacgttgcgaagcaacggcccggagggtggcgggcaggacgcccgccataaactgccaggcatcaaattaagcagaaggccatcctgacggatggcctttttgcgtttctacaaactcttcctgtcgtcatatctacaagccggcgcgccgggaaatgtgcgcggaacccctatttgtttatttttctaaatacattcaaatatgtatccgctcatgagacaataaccctgataaatgcttcaataatattgaaaaaggaagagtatgagtattcaacatttccgtgtcgcccttattcccttttttgcggcattttgccttcctgtttttgctcacccagaaacgctggtgaaagtaaaagatgctgaagatcagttgggtgcacgagtgggttacatcgaactggatctcaacagcggtaagatccttgagagttttcgccccgaagaacgttttccaatgatgagcacttttaaagttctgctatgtggcgcggtattatcccgtgttgacgccgggcaagagcaactcggtcgccgcatacactattctcagaatgacttggttgagtactcaccagtcacagaaaagcatcttacggatggcatgacagtaagagaattatgcagtgctgcaataaccatgagtgataacactgcggccaacttacttctgacaacgatcggaggaccgaaggagctaaccgcttttttgcacaacatgggggatcatgtaactcgccttgatcgttgggaaccggagctgaatgaagccataccaaacgacgagcgtgacaccacgatgcctgcagcaatggcaacaacgttgcgcaaactattaactggcgaactacttactctagcttcccggcaacaattaatagactggatggaggcggataaagttgcaggaccacttctgcgctcggcccttccggctagctggtttattgctgataaatctggagccggtgagcgtgggtctcgcggtatcattgcagcactggggccagatggtaagccctcccgtatcgtagttatctacacgacggggagtcaggcaactatggatgaacgaaatagacagatcgctgagataggtgcctcactgattaagcattggtaactgcagaccaagtttactcatatatactttagattgatttaaaacttcatttttaatttaaaaggatctaggtgaagatcctttttgataatctcatgaccaaaatcccttaacgtgagttttcgttccactgagcgtcagaccccgtagaaaagatcaaaggatcttcttgagatcctttttttctgcgcgtaatctgctgcttgcaaacaaaaaaaccaccgctaccagcggtggtttgtttgccggatcaagagctaccaactctttttccgaaggtaactggcttcagcagagcgcagataccaaatactgtccttctagtgtagccgtagttaggccaccacttcaagaactctgtagcaccgcctacatacctcgctctgctaatcctgttaccagtggctgctgccagtggcgataagtcgtgtcttaccgggttggactcaagacgatagttaccggataaggcgcagcggtcgggctgaacggggggttcgtgcacacagcccagcttggagcgaacgacctacaccgaactgagatacctacagcgtgagctatgagaaagcgccacgcttcccgaagggagaaaggcggacaggtatccggtaagcggcagggtcggaacaggagagcgcacgagggagcttccagggggaaacgcctggtatctttatagtcctgtcgggtttcgccacctctgacttgagcgtcgatttttgtgatgctcgtcaggggggcggagcctatggaaaaacgccagcaacgcggcctttttacggttcctggccttttgctgg

SEQ ID NO: 363 - DNA, 7395 bp, Artificial
  Synthetic
agacttagggaccctgcggccgccattaattcctaatttttgttgacactctatcattgatagagttattttaccactccctatcagtgatagagaaaagtgaaatgaatagaccggccgctgagaaaaagcgaagcggcactgctctttaacaatttatcagacaatctgtgtgggcactcgaagatacggattcttaacgtcgcaagacgaaaaatgaataccaagtctcaagagtgaacacgtaattcattacgaagtttaattctttgagcgtcaaacttttaaattgaagagtttgatcatggctcagattgaacgctggcggcaggcctaacacatgcaagtcgaacggtaacaggaatcagcttgctgattcgctgacgagtggcggacgggtgagtaatgtctgggaaactgcctgatggagggggataactactggaaacggtagctaataccgcataatgtcgcaagaccaaaaagggggaccttcgggcctcttgccatcagatgtgcccagatgggattagcttgttggtggggtaacggctcaccaaggcgacgatccctagctggtctgagaggatgaccagccacactggaactgagacacggtccagactcctacgggaggcagcagtggggaatattgcacaatgggcgcaagcctgatgcagccatgccgcgtgtatgaagaaggccttcgggttgtaaagtactttcagcggggaggaagggagtaaagttaatacctttgctcattgacgttatccgcagaagaagcaccggctaactccgtgccagcagccgcggtaatacggagggtgcaagcgttaatcggaattactgggcgtaaagcgcacgcaggcggtttgttaagtcagatgtgaaatccccgggctcaacctgggaactgcatctgatactggcaagcttgagtctcgtagaggggggtagaattccaggtgtagcggtgaaatgcgtagagatctggaggaataccggtggcgaaggcggccccctggacgaagactgacgctcaggtgcgaaagcgtggggagcaaacaggattagataccctggtagtccacgccgtaaacgatgtcgacttggaggttgtgcccttgaggcgtggcttccggagctaacgcgttaagtcgaccgcctggggagtacggccgcaaggttaaaactcaaatgaattgacgggggcccgcacaagcggtggagcatgtggtttaattcgatgcaacgcgaagaaccttacctggtcttgacatccacggaagttttcagagatgagaatgtgccttcgggaaccgtgagacaggtgctgcatggctgtcgtcagctcgtgttgtgaaatgttgggttaagtcccgcaacgagcgcaacccttatcctttgttgccagcggtccggccgggaactcaaaggagactgccagtgataaactggaggaaggtggggacgacgtcaagtcatcatggcccttacgaccagggctacacacgtgctacaatggcgcatacaaagagaagcgacctcgcgagagcaagcggacctcataaagtgcgtcgtagtccggattggagtctgcaactcgactccatgaagtcggaatcgctagtaatcgtggatcagaatgccacggtgaatacgttcccgggccttgtacacaccgcccgtcacaccatgggagtgggttgcaaaagaagtaggtagcttaaccggtcaacagccgtttgagctaaccggtactaatgaaccgtgaggcttaaccttgagaggttaagcgactaagcgtacacggtggatgccctggcagtcagaggcgatgaaggacgtgctaatctgcgataagcgtcggtaaggtgatatgaaccgttataaccggcgatttccgaatggggaaacccagtgtgtttcgacacactatcattaactgaatccataggttaatgaggcgaaccgggggaactgaaacatctaagtaccccgaggaaaagaaatcaaccgagattcccccagtagcggcgagcgaacggggagcagcccagagcctgaatcagtgtgtgtgttagtggaagcgtctggaaaggcgcgcgatacagggtgacagccccgtacacaaaaatgcacatgctgtgagctcgatgagtagggcgggacacgtggtatcctgtctgaatatggggggaccatcctccaaggctaaatactcctgactgaccgatagtgaaccagtaccgtgagggaaaggcgaaaagaaccccggcgaggggagtgaaaaagaacctgaaaccgtgtacgtacaagcagtgggagcacgcttaggcgtgtgactgcgtaccttttgtataatgggtcagcgacttatattctgtagcaaggttaaccgaataggggagccgaagggaaaccgagtcttaactgggcgttaagttgcagggtatagacccgaaacccggtgatctagccatgggcaggttgaaggttgggtaacactaactggaggaccgaaccgactaatgttgaaaaattagcggatgacttgtggctgggggtgaaaggccaatcaaaccgggagatagctggttctccccgaaagctatttaggtagcgcctcgtgaattcatctccgggggtagagcactgtttcggcaagggggtcatcccgacttaccaacccgatgcaaactgcgaataccggagaatgttatcacgggagacacacggcgggtgctaacgtccgtcgtgaagagggaaacaacccagaccgccagctaaggtcccaaagtcatggttaagtgggaaacgatgtgggaaggcccagacagccaggatgttggcttagaagcagccatcatttaaagaaagcgtaatagctcactggtcgagtcggcctgcgcggaagatgtaacggggctaaaccatgcaccgaagctgcggcagcgacgcttatgcgttgttgggtaggggagcgttctgtaagcctgcgaaggtgtgctgtgaggcatgctggaggtatcagaagtgcgaatgctgacataagtaacgataaagcgggtgaaaagcccgctcgccggaagaccaagggttcctgtccaacgttaatcggggcagggtgagtcgacccctaaggcgaggccgaaaggcgtagtcgatgggaaacaggttaatattcctgtacttggtgttactgcgaaggggggacggagaaggctatgttggccgggcgacggttgtcccggtttaagcgtgtaggctggttttccaggcaaatccggaaaatcaaggctgaggcgtgatgacgaggcactacggtgctgaagcaacaaatgccctgcttccaggaaaagcctctaagcatcaggtaacatcaaatcgtaccccaaaccgacacaggtggtcaggtagagaataccaaggcgcttgagagaactcgggtgaaggaactaggcaaaatggtgccgtaacttcgggagaaggcacgctgatatgtaggtgaggtccctcgcggatggagctgaaatcagtcgaagataccagctggctgcaactgtttattaaaaacacagcactgtgcaaacacgaaagtggacgtatacggtgtgacgcctgcccggtgccggaaggttaattgatggggttagcgcaagcgaagctcttgatcgaagccccggtaaacggcggccgtaactataacggtcctaaggtagcgaaattccttgtcgggtaagttccgacctgcacgaatggcgtaatgatggccaggctgtctccacccgagactcagtgaaattgaactcgctgtgaagatgcagtgtacccgcggcaagacggaaagaccccgtgaacctttactatagcttgacactgaacattgagccttgatgtgtaggataggtgggaggctttgaagtgtggacgccagtctgcatggagccgaccttgaaataccaccctttaatgtttgatgttctaacgttgacccgtaatccgggttgcggacagtgtctggtgggtagtttgactggggcggtctcctcctaaagagtaacggaggagcacgaaggttggctaatcctggtcggacatcaggaggttagtgcaatggcataagccagcttgactgcgagcgtgacggcgcgagcaggtgcgaaagcaggtcatagtgatccggtggttctgaatggaagggccatcgctcaacggataaaaggtactccggggataacaggctgataccgcccaagagttcatatcgacggcggtgtttggcacctcgatgtcggctcatcacatcctggggctgaagtaggtcccaagggtatggctgttcgccatttaaagtggtacgcgagctgggtttagaacgtcgtgagacagttcggtccctatctgccgtgggcgctggagaactgaggggggctgctcctagtacgagaggaccggagtggacgcatcactggtgttcgggttgtcatgccaatggcactgcccggtagctaaatgcggaagagataagtgctgaaagcatctaagcacgaaacttgccccgagatgagttctccctgaccctttaagggtcctgaaggaacgttgaagacgacgacgttgataggccgggtgtgtaaacggacatggttttcgggagggcgcttaccactttgtgattcatgactggggtgaagtcgtaacaaggtaaccgtaggggaacctgcggttggatcatgtggttaccttaaagaagcgtactttgtagtgctcacacagattgtctgatagaaagtgaaaagcaaggcgtttacgcgttgggagtgaggctgaagagaataaggccgttcgctttctattaatgaaagctcaccctacacgaaaatatcacgcaacgcgtgataagcaattttcgtgtccccttcgtctagaggcccaggacaccgccctttcacggcggtaacaggggttcgaatcccctaggggacgccacttgctggtttgtgagtgaaagtcgccgaccttaatatctcaaaactcatcttcgggtgatgtttgagatatttgctctttaaaaatctggatcaagctgaaaattgaaacactgaacaacgagagttgttcgtgagtctctcaaattttcgcaacacgatgatgaatcgaaaggcggatgagagaagattttcagcctgatacagattaaatcagaacgcagaagcggtctgataaaacagaatttgcctggcggcagtagcgcggtggtcccacctgaccccatgccgaactcagaagtgaaacgccgtagcgccgatggtagtgtggggtctccccatgcgagagtagggaactgccaggcatcaaataaaacgaaaggctcagtcgaaagactgggcctttcgttttatctgttgtttgtcggtgaacgctctcctgagtaggacaaatccgccgggagcggatttgaacgttgcgaagcaacggcccggagggtggcgggcaggacgcccgccataaactgccaggcatcaaattaagcagaaggccatcctgacggatggcctttttgcgtttctacaaactcttcctgtcgtcatatctacaagccggcgcgccgggaaatgtgcgcggaacccctatttgtttatttttctaaatacattcaaatatgtatccgctcatgagacaataaccctgataaatgcttcaataatattgaaaaaggaagagtatgagtattcaacatttccgtgtcgcccttattcccttttttgcggcattttgccttcctgtttttgctcacccagaaacgctggtgaaagtaaaagatgctgaagatcagttgggtgcacgagtgggttacatcgaactggatctcaacagcggtaagatccttgagagttttcgccccgaagaacgttttccaatgatgagcacttttaaagttctgctatgtggcgcggtattatcccgtgttgacgccgggcaagagcaactcggtcgccgcatacactattctcagaatgacttggttgagtactcaccagtcacagaaaagcatcttacggatggcatgacagtaagagaattatgcagtgctgcaataaccatgagtgataacactgcggccaacttacttctgacaacgatcggaggaccgaaggagctaaccgcttttttgcacaacatgggggatcatgtaactcgccttgatcgttgggaaccggagctgaatgaagccataccaaacgacgagcgtgacaccacgatgcctgcagcaatggcaacaacgttgcgcaaactattaactggcgaactacttactctagcttcccggcaacaattaatagactggatggaggcggataaagttgcaggaccacttctgcgctcggcccttccggctagctggtttattgctgataaatctggagccggtgagcgtgggtctcgcggtatcattgcagcactggggccagatggtaagccctcccgtatcgtagttatctacacgacggggagtcaggcaactatggatgaacgaaatagacagatcgctgagataggtgcctcactgattaagcattggtaactgcagaccaagtttactcatatatactttagattgatttaaaacttcatttttaatttaaaaggatctaggtgaagatcctttttgataatctcatgaccaaaatcccttaacgtgagttttcgttccactgagcgtcagaccccgtagaaaagatcaaaggatcttcttgagatcctttttttctgcgcgtaatctgctgcttgcaaacaaaaaaaccaccgctaccagcggtggtttgtttgccggatcaagagctaccaactctttttccgaaggtaactggcttcagcagagcgcagataccaaatactgtccttctagtgtagccgtagttaggccaccacttcaagaactctgtagcaccgcctacatacctcgctctgctaatcctgttaccagtggctgctgccagtggcgataagtcgtgtcttaccgggttggactcaagacgatagttaccggataaggcgcagcggtcgggctgaacggggggttcgtgcacacagcccagcttggagcgaacgacctacaccgaactgagatacctacagcgtgagctatgagaaagcgccacgcttcccgaagggagaaaggcggacaggtatccggtaagcggcagggtcggaacaggagagcgcacgagggagcttccagggggaaacgcctggtatctttatagtcctgtcgggtttcgccacctctgacttgagcgtcgatttttgtgatgctcgtcaggggggcggagcctatggaaaaacgccagcaacgcggcctttttacggttcctggccttttgctgg

SEQ ID NO: 364 - DNA, 7395 bp, Artificial
  Synthetic
agacttagggaccctgcggccgccattaattcctaatttttgttgacactctatcattgatagagttattttaccactccctatcagtgatagagaaaagtgaaatgaatagaccggccgctgagaaaaagcgaagcggcactgctctttaacaatttatcagacaatctgtgtgggcactcgaagatacggattcttaacgtcgcaagacgaaaaatgaataccaagtctcaagagtgaacacgtaattcattacgaagtttaattctttgagcgtcaaacttttaaattgaagagtttgatcatggctcagattgaacgctggcggcaggcctaacacatgcaagtcgaacggtaacaggaaacagcttgctgtttcgctgacgagtggcggacgggtgagtaatgtctgggaaactgcctgatggagggggataactactggaaacggtagctaataccgcataacgtcgcaagaccaaagagggggaccttcgggcctcttgccatcggatgtgcccagatgggattagctagtaggtggggtaacggctcacctaggcgacgatccctagctggtctgagaggatgaccagccacactggaactgagacacggtccagactcctacgggaggcagcagtggggaatattgcacaatgggcgcaagcctgatgcagccatgccgcgtgtatgaagaaggccttcgggttgtaaagtactttcagcggggaggaagggagtaaagttaatacctttgctcattgacgttacccgcagaagaagcaccggctaactccgtgccagcagccgcggtaatacggagggtgcaagcgttaatcggaattactgggcgtaaagcgcacgcaggcggtttgttaagtcagatgtgaaatccccgggctcaacctgggaactgcatctgatactggcaagcttgagtctcgtagaggggggtagaattccaggtgtagcggtgaaatgcgtagagatctggaggaatatcggtggcgaaggcggccccctggacgaagactgacgctcaggtgcgaaagcgtggggagcaaacaggattagataccctggtagtccacgccgtaaacgatgtcgacttggaggttgtgcccttgaggcgtggcttccggagctaacgcgttaagtcgaccgcctggggagtacggccgcaaggttaaaactcaaatgaattgacgggggcccgcacaagcggtggagcatgtggtttaattcgatgcaacgcgaagaaccttacctggtcttgacatccacggaagttttcagagatgagaatgtgccttcgggaaccgtgagacaggtgctgcatggctgtcgtcagctcgtgttgtgaaatgttgggttaagtcccgcaacgagcgcaacccttatcctttgttgccagcggtccggccgggaactcaaaggagactgccagtgataaactggaggaaggtggggatgacgtcaagtcatcatggcccttacgaccagggctacacacgtgctacaatggcgcatacaaagagaagcgacctcgcgagagcaagcggacctcataaagtgcgtcgtagtccggattggagtctgcaactcgactccatgaagtcggaatcgctagtaatcgtggatcagaatgccacggtgaatacgttcccgggccttgtacacaccgcccgtcacaccatgggagtgggttgcaaaagaagtaggtagcttaaccggtcaacagccgtttgagctaaccggtactaatgaaccgtgaggcttaaccttgagaggttaagcgactaagcgtacacggtggatgccctggcagtcagaggcgatgaaggacgtgctaatctgcgataagcgtcggtaaggtgatatgaaccgttataaccggcgatttccgaatggggaaacccagtgtgtttcgacacactatcattaactgaatccataggttaatgaggcgaaccgggggaactgaaacatctaagtaccccgaggaaaagaaatcaaccgagattcccccagtagcggcgagcgaacggggagcagcccagagcctgaatcagtgtgtgtgttagtggaagcgtctggaaaggcgcgcgatacagggtgacagccccgtacacaaaaatgcacatgctgtgagctcgatgagtagggcgggacacgtggtatcctgtctgaatatggggggaccatcctccaaggctaaatactcctgactgaccgatagtgaaccagtaccgtgagggaaaggcgaaaagaaccccggcgaggggagtgaaaaagaacctgaaaccgtgtacgtacaagcagtgggagcacgcttaggcgtgtgactgcgtaccttttgtataatgggtcagcgacttatattctgtagcaaggttaaccgaataggggagccgaagggaaaccgagtcttaactgggcgttaagttgcagggtatagacccgaaacccggtgatctagccatgggcaggttgaaggttgggtaacactaactggaggaccgaaccgactaatgttgaaaaattagcggatgacttgtggctgggggtgaaaggccaatcaaaccgggagatagctggttctccccgaaagctatttaggtagcgcctcgtgaattcatctccgggggtagagcactgtttcggcaagggggtcatcccgacttaccaacccgatgcaaactgcgaataccggagaatgttatcacgggagacacacggcgggtgctaacgtccgtcgtgaagagggaaacaacccagaccgccagctaaggtcccaaagtcatggttaagtgggaaacgatgtgggaaggcccagacagccaggatgttggcttagaagcagccatcatttaaagaaagcgtaatagctcactggtcgagtcggcctgcgcggaagatgtaacggggctaaaccatgcaccgaagctgcggcagcgacgcttatgcgttgttgggtaggggagcgttctgtaagcctgcgaaggtgtgctgtgaggcatgctggaggtatcagaagtgcgaatgctgacataagtaacgataaagcgggtgaaaagcccgctcgccggaagaccaagggttcctgtccaacgttaatcggggcagggtgagtcgacccctaaggcgaggccgaaaggcgtagtcgatgggaaacaggttaatattcctgtacttggtgttactgcgaaggggggacggagaaggctatgttggccgggcgacggttgtcccggtttaagcgtgtaggctggttttccaggcaaatccggaaaatcaaggctgaggcgtgatgacgaggcactacggtgctgaagcaacaaatgccctgcttccaggaaaagcctctaagcatcaggtaacatcaaatcgtaccccaaaccgacacaggtggtcaggtagagaataccaaggcgcttgagagaactcgggtgaaggaactaggcaaaatggtgccgtaacttcgggagaaggcacgctgatatgtaggtgaggtccctcgcggatggagctgaaatcagtcgaagataccagctggctgcaactgtttattaaaaacacagcactgtgcaaacacgaaagtggacgtatacggtgtgacgcctgcccggtgccggaaggttaattgatggggttagcgcaagcgaagctcttgatcgaagccccggtaaacggcggccgtaactataacggtcctaaggtagcgaaattccttgtcgggtaagttccgacctgcacgaatggcgtaatgatggccaggctgtctccacccgagactcagtgaaattgaactcgctgtgaagatgcagtgtacccgcggcaagacggaaagaccccgtgaacctttactatagcttgacactgaacattgagccttgatgtgtaggataggtgggaggctttgaagtgtggacgccagtctgcatggagccgaccttgaaataccaccctttaatgtttgatgttctaacgttgacccgtaatccgggttgcggacagtgtctggtgggtagtttgactggggcggtctcctcctaaagagtaacggaggagcacgaaggttggctaatcctggtcggacatcaggaggttagtgcaatggcataagccagcttgactgcgagcgtgacggcgcgagcaggtgcgaaagcaggtcatagtgatccggtggttctgaatggaagggccatcgctcaacggataaaaggtactccggggataacaggctgataccgcccaagagttcatatcgacggcggtgtttggcacctcgatgtcggctcatcacatcctggggctgaagtaggtcccaagggtatggctgttcgccatttaaagtggtacgcgagctgggtttagaacgtcgtgagacagttcggtccctatctgccgtgggcgctggagaactgaggggggctgctcctagtacgagaggaccggagtggacgcatcactggtgttcgggttgtcatgccaatggcactgcccggtagctaaatgcggaagagataagtgctgaaagcatctaagcacgaaacttgccccgagatgagttctccctgaccctttaagggtcctgaaggaacgttgaagacgacgacgttgataggccgggtgtgtaaacggacatggttttcgggagggcgcttaccactttgtgattcatgactggggtgaagtcgtaacaaggtaaccgtaggggaacctgcggttggatcatgtggttaccttaaagaagcgtactttgtagtgctcacacagattgtctgatagaaagtgaaaagcaaggcgtttacgcgttgggagtgaggctgaagagaataaggccgttcgctttctattaatgaaagctcaccctacacgaaaatatcacgcaacgcgtgataagcaattttcgtgtccccttcgtctagaggcccaggacaccgccctttcacggcggtaacaggggttcgaatcccctaggggacgccacttgctggtttgtgagtgaaagtcgccgaccttaatatctcaaaactcatcttcgggtgatgtttgagatatttgctctttaaaaatctggatcaagctgaaaattgaaacactgaacaacgagagttgttcgtgagtctctcaaattttcgcaacacgatgatgaatcgaaaggcggatgagagaagattttcagcctgatacagattaaatcagaacgcagaagcggtctgataaaacagaatttgcctggcggcagtagcgcggtggtcccacctgaccccatgccgaactcagaagtgaaacgccgtagcgccgatggtagtgtggggtctccccatgcgagagtagggaactgccaggcatcaaataaaacgaaaggctcagtcgaaagactgggcctttcgttttatctgttgtttgtcggtgaacgctctcctgagtaggacaaatccgccgggagcggatttgaacgttgcgaagcaacggcccggagggtggcgggcaggacgcccgccataaactgccaggcatcaaattaagcagaaggccatcctgacggatggcctttttgcgtttctacaaactcttcctgtcgtcatatctacaagccggcgcgccgggaaatgtgcgcggaacccctatttgtttatttttctaaatacattcaaatatgtatccgctcatgagacaataaccctgataaatgcttcaataatattgaaaaaggaagagtatgagtattcaacatttccgtgtcgcccttattcccttttttgcggcattttgccttcctgtttttgctcacccagaaacgctggtgaaagtaaaagatgctgaagatcagttgggtgcacgagtgggttacatcgaactggatctcaacagcggtaagatccttgagagttttcgccccgaagaacgttttccaatgatgagcacttttaaagttctgctatgtggcgcggtattatcccgtgttgacgccgggcaagagcaactcggtcgccgcatacactattctcagaatgacttggttgagtactcaccagtcacagaaaagcatcttacggatggcatgacagtaagagaattatgcagtgctgcaataaccatgagtgataacactgcggccaacttacttctgacaacgatcggaggaccgaaggagctaaccgcttttttgcacaacatgggggatcatgtaactcgccttgatcgttgggaaccggagctgaatgaagccataccaaacgacgagcgtgacaccacgatgcctgcagcaatggcaacaacgttgcgcaaactattaactggcgaactacttactctagcttcccggcaacaattaatagactggatggaggcggataaagttgcaggaccacttctgcgctcggcccttccggctagctggtttattgctgataaatctggagccggtgagcgtgggtctcgcggtatcattgcagcactggggccagatggtaagccctcccgtatcgtagttatctacacgacggggagtcaggcaactatggatgaacgaaatagacagatcgctgagataggtgcctcactgattaagcattggtaactgcagaccaagtttactcatatatactttagattgatttaaaacttcatttttaatttaaaaggatctaggtgaagatcctttttgataatctcatgaccaaaatcccttaacgtgagttttcgttccactgagcgtcagaccccgtagaaaagatcaaaggatcttcttgagatcctttttttctgcgcgtaatctgctgcttgcaaacaaaaaaaccaccgctaccagcggtggtttgtttgccggatcaagagctaccaactctttttccgaaggtaactggcttcagcagagcgcagataccaaatactgtccttctagtgtagccgtagttaggccaccacttcaagaactctgtagcaccgcctacatacctcgctctgctaatcctgttaccagtggctgctgccagtggcgataagtcgtgtcttaccgggttggactcaagacgatagttaccggataaggcgcagcggtcgggctgaacggggggttcgtgcacacagcccagcttggagcgaacgacctacaccgaactgagatacctacagcgtgagctatgagaaagcgccacgcttcccgaagggagaaaggcggacaggtatccggtaagcggcagggtcggaacaggagagcgcacgagggagcttccagggggaaacgcctggtatctttatagtcctgtcgggtttcgccacctctgacttgagcgtcgatttttgtgatgctcgtcaggggggcggagcctatggaaaaacgccagcaacgcggcctttttacggttcctggccttttgctgg

SEQ ID NO: 365 - DNA, 7395 bp, Artificial
  Synthetic
agacttagggaccctgcggccgccattaattcctaatttttgttgacactctatcattgatagagttattttaccactccctatcagtgatagagaaaagtgaaatgaatagaccggccgctgagaaaaagcgaagcggcactgctctttaacaatttatcagacaatctgtgtgggcactcgaagatacggattcttaacgtcgcaagacgaaaaatgaataccaagtctcaagagtgaacacgtaattcattacgaagtttaattctttgagcgtcaaacttttaaattgaagagtttgatcatggctcagattgaacgctggcggcaggcctaacacatgcaagtcgaacggtaacaggaagcagcttgctgtttcgctgacgagtggcggacgggtgagtaatgtctgggaaactgcctgatggagggggataactactggaaacggtagctaataccgcataacgtcgcaagaccaaagagggggaccttcgggcctcttgccatcggatgtgcccagatgggattagctagtaggtggggtaacggctcacctaggcgacgatccctagctggtctgagaggatgaccagccacactggaactgagacacggtccagactcctacgggaggcagcagtggggaatattgcacaatgggcgcaagcctgatgcagccatgccgcgtgtatgaagaaggccttcgggttgtaaagtactttcagcggggaggaagggagtaaagttaatacctttactcattgacgttacccgcagaagaagcaccggctaactccgtgccagcagccgcggtaatacggagggtgcaagcgttaatcggaattactgggcgtaaagcgcacgcaggcggtttgttaagtcagatgtgaaatccccgggctcaacctgggaactgcatctgatactggcaagcttgagtctcgtagaggggggtagaattccaggtgtagcggtgaaatgcgtagagatctggaggaataccggtggcgaaggcggccccctggacgaagactgacgctcaggtgcgaaagcgtggggagcaaacaggattagataccctggtagtccacgccgtaaacgatgtcgacttggaggttgtgcccttgaggtgtggcttccggagctaacgcgttaagtcgaccgcctggggagtacggccgcaaggttaaaactcaaatgaattgacgggggcccgcacaagcggtggagcatgtggtttaattcgatgcaacgcgaagaaccttacctggtcttgacatccacggaagttttcagagatgagaatgtgccttcgggaaccgtgagacaggtgctgcatggctgtcgtcagctcgtgttgtgaaatgttgggttaagtcccgcaacgagcgcaacccttatcctttgttgccagcggtccggccgggaactcaaaggagactgccagtgataaactggaggaaggtggggatgacgtcaagtcatcatggcccttacgaccagggctacacacgtgctacaatggcgcatacaaagagaagcgacctcgcgagagcaagcggacctcataaagtgcgtcgtagtccggattggagtctgcaactcgactccatgaagtcggaatcgctagtaatcgtggatcagaatgccacggtgaatacgttcccgggccttgtacacaccgcccgtcacaccatgggagtgggttgcaaaagaagtaggtagcttaaccggtcaacagccgtttgagctaaccggtactaatgaaccgtgaggcttaaccttgagaggttaagcgactaagcgtacacggtggatgccctggcagtcagaggcgatgaaggacgtgctaatctgcgataagcgtcggtaaggtgatatgaaccgttataaccggcgatttccgaatggggaaacccagtgtgtttcgacacactatcattaactgaatccataggttaatgaggcgaaccgggggaactgaaacatctaagtaccccgaggaaaagaaatcaaccgagattcccccagtagcggcgagcgaacggggagcagcccagagcctgaatcagtgtgtgtgttagtggaagcgtctggaaaggcgcgcgatacagggtgacagccccgtacacaaaaatgcacatgctgtgagctcgatgagtagggcgggacacgtggtatcctgtctgaatatggggggaccatcctccaaggctaaatactcctgactgaccgatagtgaaccagtaccgtgagggaaaggcgaaaagaaccccggcgaggggagtgaaaaagaacctgaaaccgtgtacgtacaagcagtgggagcacgcttaggcgtgtgactgcgtaccttttgtataatgggtcagcgacttatattctgtagcaaggttaaccgaataggggagccgaagggaaaccgagtcttaactgggcgttaagttgcagggtatagacccgaaacccggtgatctagccatgggcaggttgaaggttgggtaacactaactggaggaccgaaccgactaatgttgaaaaattagcggatgacttgtggctgggggtgaaaggccaatcaaaccgggagatagctggttctccccgaaagctatttaggtagcgcctcgtgaattcatctccgggggtagagcactgtttcggcaagggggtcatcccgacttaccaacccgatgcaaactgcgaataccggagaatgttatcacgggagacacacggcgggtgctaacgtccgtcgtgaagagggaaacaacccagaccgccagctaaggtcccaaagtcatggttaagtgggaaacgatgtgggaaggcccagacagccaggatgttggcttagaagcagccatcatttaaagaaagcgtaatagctcactggtcgagtcggcctgcgcggaagatgtaacggggctaaaccatgcaccgaagctgcggcagcgacgcttatgcgttgttgggtaggggagcgttctgtaagcctgcgaaggtgtgctgtgaggcatgctggaggtatcagaagtgcgaatgctgacataagtaacgataaagcgggtgaaaagcccgctcgccggaagaccaagggttcctgtccaacgttaatcggggcagggtgagtcgacccctaaggcgaggccgaaaggcgtagtcgatgggaaacaggttaatattcctgtacttggtgttactgcgaaggggggacggagaaggctatgttggccgggcgacggttgtcccggtttaagcgtgtaggctggttttccaggcaaatccggaaaatcaaggctgaggcgtgatgacgaggcactacggtgctgaagcaacaaatgccctgcttccaggaaaagcctctaagcatcaggtaacatcaaatcgtaccccaaaccgacacaggtggtcaggtagagaataccaaggcgcttgagagaactcgggtgaaggaactaggcaaaatggtgccgtaacttcgggagaaggcacgctgatatgtaggtgaggtccctcgcggatggagctgaaatcagtcgaagataccagctggctgcaactgtttattaaaaacacagcactgtgcaaacacgaaagtggacgtatacggtgtgacgcctgcccggtgccggaaggttaattgatggggttagcgcaagcgaagctcttgatcgaagccccggtaaacggcggccgtaactataacggtcctaaggtagcgaaattccttgtcgggtaagttccgacctgcacgaatggcgtaatgatggccaggctgtctccacccgagactcagtgaaattgaactcgctgtgaagatgcagtgtacccgcggcaagacggaaagaccccgtgaacctttactatagcttgacactgaacattgagccttgatgtgtaggataggtgggaggctttgaagtgtggacgccagtctgcatggagccgaccttgaaataccaccctttaatgtttgatgttctaacgttgacccgtaatccgggttgcggacagtgtctggtgggtagtttgactggggcggtctcctcctaaagagtaacggaggagcacgaaggttggctaatcctggtcggacatcaggaggttagtgcaatggcataagccagcttgactgcgagcgtgacggcgcgagcaggtgcgaaagcaggtcatagtgatccggtggttctgaatggaagggccatcgctcaacggataaaaggtactccggggataacaggctgataccgcccaagagttcatatcgacggcggtgtttggcacctcgatgtcggctcatcacatcctggggctgaagtaggtcccaagggtatggctgttcgccatttaaagtggtacgcgagctgggtttagaacgtcgtgagacagttcggtccctatctgccgtgggcgctggagaactgaggggggctgctcctagtacgagaggaccggagtggacgcatcactggtgttcgggttgtcatgccaatggcactgcccggtagctaaatgcggaagagataagtgctgaaagcatctaagcacgaaacttgccccgagatgagttctccctgaccctttaagggtcctgaaggaacgttgaagacgacgacgttgataggccgggtgtgtaaacggacatggttttcgggagggcgcttaccactttgtgattcatgactggggtgaagtcgtaacaaggtaaccgtaggggaacctgcggttggatcatgtggttaccttaaagaagcgtactttgtagtgctcacacagattgtctgatagaaagtgaaaagcaaggcgtttacgcgttgggagtgaggctgaagagaataaggccgttcgctttctattaatgaaagctcaccctacacgaaaatatcacgcaacgcgtgataagcaattttcgtgtccccttcgtctagaggcccaggacaccgccctttcacggcggtaacaggggttcgaatcccctaggggacgccacttgctggtttgtgagtgaaagtcgccgaccttaatatctcaaaactcatcttcgggtgatgtttgagatatttgctctttaaaaatctggatcaagctgaaaattgaaacactgaacaacgagagttgttcgtgagtctctcaaattttcgcaacacgatgatgaatcgaaaggcggatgagagaagattttcagcctgatacagattaaatcagaacgcagaagcggtctgataaaacagaatttgcctggcggcagtagcgcggtggtcccacctgaccccatgccgaactcagaagtgaaacgccgtagcgccgatggtagtgtggggtctccccatgcgagagtagggaactgccaggcatcaaataaaacgaaaggctcagtcgaaagactgggcctttcgttttatctgttgtttgtcggtgaacgctctcctgagtaggacaaatccgccgggagcggatttgaacgttgcgaagcaacggcccggagggtggcgggcaggacgcccgccataaactgccaggcatcaaattaagcagaaggccatcctgacggatggcctttttgcgtttctacaaactcttcctgtcgtcatatctacaagccggcgcgccgggaaatgtgcgcggaacccctatttgtttatttttctaaatacattcaaatatgtatccgctcatgagacaataaccctgataaatgcttcaataatattgaaaaaggaagagtatgagtattcaacatttccgtgtcgcccttattcccttttttgcggcattttgccttcctgtttttgctcacccagaaacgctggtgaaagtaaaagatgctgaagatcagttgggtgcacgagtgggttacatcgaactggatctcaacagcggtaagatccttgagagttttcgccccgaagaacgttttccaatgatgagcacttttaaagttctgctatgtggcgcggtattatcccgtgttgacgccgggcaagagcaactcggtcgccgcatacactattctcagaatgacttggttgagtactcaccagtcacagaaaagcatcttacggatggcatgacagtaagagaattatgcagtgctgcaataaccatgagtgataacactgcggccaacttacttctgacaacgatcggaggaccgaaggagctaaccgcttttttgcacaacatgggggatcatgtaactcgccttgatcgttgggaaccggagctgaatgaagccataccaaacgacgagcgtgacaccacgatgcctgcagcaatggcaacaacgttgcgcaaactattaactggcgaactacttactctagcttcccggcaacaattaatagactggatggaggcggataaagttgcaggaccacttctgcgctcggcccttccggctagctggtttattgctgataaatctggagccggtgagcgtgggtctcgcggtatcattgcagcactggggccagatggtaagccctcccgtatcgtagttatctacacgacggggagtcaggcaactatggatgaacgaaatagacagatcgctgagataggtgcctcactgattaagcattggtaactgcagaccaagtttactcatatatactttagattgatttaaaacttcatttttaatttaaaaggatctaggtgaagatcctttttgataatctcatgaccaaaatcccttaacgtgagttttcgttccactgagcgtcagaccccgtagaaaagatcaaaggatcttcttgagatcctttttttctgcgcgtaatctgctgcttgcaaacaaaaaaaccaccgctaccagcggtggtttgtttgccggatcaagagctaccaactctttttccgaaggtaactggcttcagcagagcgcagataccaaatactgtccttctagtgtagccgtagttaggccaccacttcaagaactctgtagcaccgcctacatacctcgctctgctaatcctgttaccagtggctgctgccagtggcgataagtcgtgtcttaccgggttggactcaagacgatagttaccggataaggcgcagcggtcgggctgaacggggggttcgtgcacacagcccagcttggagcgaacgacctacaccgaactgagatacctacagcgtgagctatgagaaagcgccacgcttcccgaagggagaaaggcggacaggtatccggtaagcggcagggtcggaacaggagagcgcacgagggagcttccagggggaaacgcctggtatctttatagtcctgtcgggtttcgccacctctgacttgagcgtcgatttttgtgatgctcgtcaggggggcggagcctatggaaaaacgccagcaacgcggcctttttacggttcctggccttttgctgg

SEQ ID NO: 366 - DNA, 7391 bp, Artificial; identical to SEQ ID NO: 345
  Synthetic

SEQ ID NO: 367 - DNA, 7396 bp, Artificial
  Synthetic
agacttagggaccctgcggccgccattaattcctaatttttgttgacactctatcattgatagagttattttaccactccctatcagtgatagagaaaagtgaaatgaatagaccggccgctgagaaaaagcgaagcggcactgctctttaacaatttatcagacaatctgtgtgggcactcgaagatacggattcttaacgtcgcaagacgaaaaatgaataccaagtctcaagagtgaacacgtaattcattacgaagtttaattctttgagcgtcaaacttttaaattgaagagtttgatcatggctcagattgaacgctggcggcaggcctaacacatgcaagtcgaacggtaacaggaagcagcttgctgcttcgctgacgagtggcggacgggtgagtaatgtctgggaaactgcctgatggagggggataactactggaaacggtggctaataccgcataacgtcgcaagaccaaagagggggaccttcgggcctcttgccatcagatgtgcccagatgggattagctagttggtgaggtaacggctcaccaaggcgacgatccctagctggtctgagaggatgaccagccacactggaactgagacacggtccagactcctacgggaggcagcagtggggaatattgcacaatgggcgcaagcctgatgcagccatgccgcgtgtatgaagaaggccttcgggttgtaaagtactttcagcggggaggaaggtgttgtggttaataaccgcagcaattgacgttacccgcagaagaagcaccggctaactccgtgccagcagccgcggtaatacggagggtgcaagcgttaatcggaattactgggcgtaaagcgcacgcaggcggtctgtcaagtcggatgtgaaatccccgggctcaacctgggaactgcattcgaaactggcaggcttgagtcttgtagaggggggtagaattccaggtgtagcggtgaaatgcgtagagatctggaggaataccggtggcgaaggcggccccctggacaaagactgacgctcaggtgcgaaagcgtggggagcaaacaggattagataccctggtagtccacgccgtaaacgatgtctacttggaggttgtgcccttgaggcgtggcttccggagctaacgcgttaagtagaccgcctggggagtacggccgcaaggttaaaactcaaatgaattgacgggggcccgcacaagcggtggagcatgtggtttaattcgatgcaacgcgaagaaccttacctggtcttgacatccacagaactttccagagatggattggtgccttcgggaactgtgagacaggtgctgcatggctgtcgtcagctcgtgttgtgaaatgttgggttaagtcccgcaacgagcgcaacccttatcctttgttgccagcgattaggtcgggaactcaaaggagactgccagtgataaactggaggaaggtggggatgacgtcaagtcatcatggcccttacgaccagggctacacacgtgctacaatggcgcatacaaagagaagcgacctcgcgagagcaagcggacctcataaagtgcgtcgtagtccggattggagtctgcaactcgactccatgaagtcggaatcgctagtaatcgtggatcagaatgccacggtgaatacgttcccgggccttgtacacaccgcccgtcacaccatgggagtgggttgcaaaagaagtaggtagcttaaccggtcaacagccgtttgagctaaccggtactaatgaaccgtgaggcttaaccttgagaggttaagcgactaagcgtacacggtggatgccctggcagtcagaggcgatgaaggacgtgctaatctgcgataagcgtcggtaaggtgatatgaaccgttataaccggcgatttccgaatggggaaacccagtgtgtttcgacacactatcattaactgaatccataggttaatgaggcgaaccgggggaactgaaacatctaagtaccccgaggaaaagaaatcaaccgagattcccccagtagcggcgagcgaacggggagcagcccagagcctgaatcagtgtgtgtgttagtggaagcgtctggaaaggcgcgcgatacagggtgacagccccgtacacaaaaatgcacatgctgtgagctcgatgagtagggcgggacacgtggtatcctgtctgaatatggggggaccatcctccaaggctaaatactcctgactgaccgatagtgaaccagtaccgtgagggaaaggcgaaaagaaccccggcgaggggagtgaaaaagaacctgaaaccgtgtacgtacaagcagtgggagcacgcttaggcgtgtgactgcgtaccttttgtataatgggtcagcgacttatattctgtagcaaggttaaccgaataggggagccgaagggaaaccgagtcttaactgggcgttaagttgcagggtatagacccgaaacccggtgatctagccatgggcaggttgaaggttgggtaacactaactggaggaccgaaccgactaatgttgaaaaattagcggatgacttgtggctgggggtgaaaggccaatcaaaccgggagatagctggttctccccgaaagctatttaggtagcgcctcgtgaattcatctccgggggtagagcactgtttcggcaagggggtcatcccgacttaccaacccgatgcaaactgcgaataccggagaatgttatcacgggagacacacggcgggtgctaacgtccgtcgtgaagagggaaacaacccagaccgccagctaaggtcccaaagtcatggttaagtgggaaacgatgtgggaaggcccagacagccaggatgttggcttagaagcagccatcatttaaagaaagcgtaatagctcactggtcgagtcggcctgcgcggaagatgtaacggggctaaaccatgcaccgaagctgcggcagcgacgcttatgcgttgttgggtaggggagcgttctgtaagcctgcgaaggtgtgctgtgaggcatgctggaggtatcagaagtgcgaatgctgacataagtaacgataaagcgggtgaaaagcccgctcgccggaagaccaagggttcctgtccaacgttaatcggggcagggtgagtcgacccctaaggcgaggccgaaaggcgtagtcgatgggaaacaggttaatattcctgtacttggtgttactgcgaaggggggacggagaaggctatgttggccgggcgacggttgtcccggtttaagcgtgtaggctggttttccaggcaaatccggaaaatcaaggctgaggcgtgatgacgaggcactacggtgctgaagcaacaaatgccctgcttccaggaaaagcctctaagcatcaggtaacatcaaatcgtaccccaaaccgacacaggtggtcaggtagagaataccaaggcgcttgagagaactcgggtgaaggaactaggcaaaatggtgccgtaacttcgggagaaggcacgctgatatgtaggtgaggtccctcgcggatggagctgaaatcagtcgaagataccagctggctgcaactgtttattaaaaacacagcactgtgcaaacacgaaagtggacgtatacggtgtgacgcctgcccggtgccggaaggttaattgatggggttagcgcaagcgaagctcttgatcgaagccccggtaaacggcggccgtaactataacggtcctaaggtagcgaaattccttgtcgggtaagttccgacctgcacgaatggcgtaatgatggccaggctgtctccacccgagactcagtgaaattgaactcgctgtgaagatgcagtgtacccgcggcaagacggaaagaccccgtgaacctttactatagcttgacactgaacattgagccttgatgtgtaggataggtgggaggctttgaagtgtggacgccagtctgcatggagccgaccttgaaataccaccctttaatgtttgatgttctaacgttgacccgtaatccgggttgcggacagtgtctggtgggtagtttgactggggcggtctcctcctaaagagtaacggaggagcacgaaggttggctaatcctggtcggacatcaggaggttagtgcaatggcataagccagcttgactgcgagcgtgacggcgcgagcaggtgcgaaagcaggtcatagtgatccggtggttctgaatggaagggccatcgctcaacggataaaaggtactccggggataacaggctgataccgcccaagagttcatatcgacggcggtgtttggcacctcgatgtcggctcatcacatcctggggctgaagtaggtcccaagggtatggctgttcgccatttaaagtggtacgcgagctgggtttagaacgtcgtgagacagttcggtccctatctgccgtgggcgctggagaactgaggggggctgctcctagtacgagaggaccggagtggacgcatcactggtgttcgggttgtcatgccaatggcactgcccggtagctaaatgcggaagagataagtgctgaaagcatctaagcacgaaacttgccccgagatgagttctccctgaccctttaagggtcctgaaggaacgttgaagacgacgacgttgataggccgggtgtgtaaacggacatggttttcgggagggcgcttaccactttgtgattcatgactggggtgaagtcgtaacaaggtaaccgtaggggaacctgcggttggatcatgtggttaccttaaagaagcgtactttgtagtgctcacacagattgtctgatagaaagtgaaaagcaaggcgtttacgcgttgggagtgaggctgaagagaataaggccgttcgctttctattaatgaaagctcaccctacacgaaaatatcacgcaacgcgtgataagcaattttcgtgtccccttcgtctagaggcccaggacaccgccctttcacggcggtaacaggggttcgaatcccctaggggacgccacttgctggtttgtgagtgaaagtcgccgaccttaatatctcaaaactcatcttcgggtgatgtttgagatatttgctctttaaaaatctggatcaagctgaaaattgaaacactgaacaacgagagttgttcgtgagtctctcaaattttcgcaacacgatgatgaatcgaaaggcggatgagagaagattttcagcctgatacagattaaatcagaacgcagaagcggtctgataaaacagaattttgcctggcggcagtagcgcggtggtcccacctgaccccatgccgaactcagaagtgaaacgccgtagcgccgatggtagtgtggggtctccccatgcgagagtagggaactgccaggcatcaaataaaacgaaaggctcagtcgaaagactgggcctttcgttttatctgttgtttgtcggtgaacgctctcctgagtaggacaaatccgccgggagcggatttgaacgttgcgaagcaacggcccggagggtggcgggcaggacgcccgccataaactgccaggcatcaaattaagcagaaggccatcctgacggatggcctttttgcgtttctacaaactcttcctgtcgtcatatctacaagccggcgcgccgggaaatgtgcgcggaacccctatttgtttatttttctaaatacattcaaatatgtatccgctcatgagacaataaccctgataaatgcttcaataatattgaaaaaggaagagtatgagtattcaacatttccgtgtcgcccttattcccttttttgcggcattttgccttcctgtttttgctcacccagaaacgctggtgaaagtaaaagatgctgaagatcagttgggtgcacgagtgggttacatcgaactggatctcaacagcggtaagatccttgagagttttcgccccgaagaacgttttccaatgatgagcacttttaaagttctgctatgtggcgcggtattatcccgtgttgacgccgggcaagagcaactcggtcgccgcatacactattctcagaatgacttggttgagtactcaccagtcacagaaaagcatcttacggatggcatgacagtaagagaattatgcagtgctgcaataaccatgagtgataacactgcggccaacttacttctgacaacgatcggaggaccgaaggagctaaccgcttttttgcacaacatgggggatcatgtaactcgccttgatcgttgggaaccggagctgaatgaagccataccaaacgacgagcgtgacaccacgatgcctgcagcaatggcaacaacgttgcgcaaactattaactggcgaactacttactctagcttcccggcaacaattaatagactggatggaggcggataaagttgcaggaccacttctgcgctcggcccttccggctagctggtttattgctgataaatctggagccggtgagcgtgggtctcgcggtatcattgcagcactggggccagatggtaagccctcccgtatcgtagttatctacacgacggggagtcaggcaactatggatgaacgaaatagacagatcgctgagataggtgcctcactgattaagcattggtaactgcagaccaagtttactcatatatactttagattgatttaaaacttcatttttaatttaaaaggatctaggtgaagatcctttttgataatctcatgaccaaaatcccttaacgtgagttttcgttccactgagcgtcagaccccgtagaaaagatcaaaggatcttcttgagatcctttttttctgcgcgtaatctgctgcttgcaaacaaaaaaaccaccgctaccagcggtggtttgtttgccggatcaagagctaccaactctttttccgaaggtaactggcttcagcagagcgcagataccaaatactgtccttctagtgtagccgtagttaggccaccacttcaagaactctgtagcaccgcctacatacctcgctctgctaatcctgttaccagtggctgctgccagtggcgataagtcgtgtcttaccgggttggactcaagacgatagttaccggataaggcgcagcggtcgggctgaacggggggttcgtgcacacagcccagcttggagcgaacgacctacaccgaactgagatacctacagcgtgagctatgagaaagcgccacgcttcccgaagggagaaaggcggacaggtatccggtaagcggcagggtcggaacaggagagcgcacgagggagcttccagggggaaacgcctggtatctttatagtcctgtcgggtttcgccacctctgacttgagcgtcgatttttgtgatgctcgtcaggggggcggagcctatggaaaaacgccagcaacgcggcctttttacggttcctggccttttgctgg

SEQ ID NO: 368 - DNA, 7393 bp, Artificial
  Synthetic
agacttagggaccctgcggccgccattaattcctaatttttgttgacactctatcattgatagagttattttaccactccctatcagtgatagagaaaagtgaaatgaatagaccggccgctgagaaaaagcgaagcggcactgctctttaacaatttatcagacaatctgtgtgggcactcgaagatacggattcttaacgtcgcaagacgaaaaatgaataccaagtctcaagagtgaacacgtaattcattacgaagtttaattctttgagcgtcaaacttttaaattgaagagtttgatcatggctcagattgaacgctggcggcaggcctaacacatgcaagtcgaacggtagcacagagagcttgctctcgggtgacgagtggcggacgggtgagtaatgtctgggaaactgcccgatggagggggataactactggaaacggtagctaataccgcataacgtcgcaagaccaaagagggggaccttcgggcctcttgccatcggatgtgcccagatgggattagctagtaggtggggtaacggctcacctaggcgacgatccctagctggtctgagaggatgaccagccacactggaactgagacacggtccagactcctacgggaggcagcagtggggaatattgcacaatgggcgcaagcctgatgcagccatgccgcgtgtatgaagaaggccttcgggttgtaaagtactttcagcgaggaggaaggcgttgtggttaataaccgcaacgattgacgttactcgcagaagaagcaccggctaactccgtgccagcagccgcggtaatacggagggtgcaagcgttaatcggaattactgggcgtaaagcgcacgcaggcggtctgtcaagtcggatgtgaaatccccgggctcaacctgggaactgcatccgaaactggcaggctagagtcttgtagaggggggtagaattccaggtgtagcggtgaaatgcgtagagatctggaggaataccggtggcgaaggcggccccctggacaaagactgacgctcaggtgcgaaagcgtggggagcaaacaggattagataccctggtagtccacgccgtaaacgatgtcgacttggaggttgtgcccttgaggcgtggcttccggagctaacgcgttaagtcgaccgcctggggagtacggccgcaaggttaaaactcaaatgaattgacgggggcccgcacaagcggtggagcatgtggtttaattcgatgcaacgcgaagaaccttacctactcttgacatccagagaacttagcagagatgctttggtgccttcgggaactctgagacaggtgctgcatggctgtcgtcagctcgtgttgtgaaatgttgggttaagtcccgcaacgagcgcaacccttatcctttgttgccagcggtccggccgggaactcaaaggagactgccagtgataaactggaggaaggtggggatgacgtcaagtcatcatggcccttacgagtagggctacacacgtgctacaatggcatatacaaagagaagcgacctcgcgagagcaagcggacctcataaagtatgtcgtagtccggattggagtctgcaactcgactccatgaagtcggaatcgctagtaatcgtggatcagaatgccacggtgaatacgttcccgggccttgtacacaccgcccgtcacaccatgggagtgggttgcaaaagaagtaggtagcttaaccggtcaacagccgtttgagctaaccggtactaatgaaccgtgaggcttaaccttgagaggttaagcgactaagcgtacacggtggatgccctggcagtcagaggcgatgaaggacgtgctaatctgcgataagcgtcggtaaggtgatatgaaccgttataaccggcgatttccgaatggggaaacccagtgtgtttcgacacactatcattaactgaatccataggttaatgaggcgaaccgggggaactgaaacatctaagtaccccgaggaaaagaaatcaaccgagattcccccagtagcggcgagcgaacggggagcagcccagagcctgaatcagtgtgtgtgttagtggaagcgtctggaaaggcgcgcgatacagggtgacagccccgtacacaaaaatgcacatgctgtgagctcgatgagtagggcgggacacgtggtatcctgtctgaatatggggggaccatcctccaaggctaaatactcctgactgaccgatagtgaaccagtaccgtgagggaaaggcgaaaagaaccccggcgaggggagtgaaaaagaacctgaaaccgtgtacgtacaagcagtgggagcacgcttaggcgtgtgactgcgtaccttttgtataatgggtcagcgacttatattctgtagcaaggttaaccgaataggggagccgaagggaaaccgagtcttaactgggcgttaagttgcagggtatagacccgaaacccggtgatctagccatgggcaggttgaaggttgggtaacactaactggaggaccgaaccgactaatgttgaaaaattagcggatgacttgtggctgggggtgaaaggccaatcaaaccgggagatagctggttctccccgaaagctatttaggtagcgcctcgtgaattcatctccgggggtagagcactgtttcggcaagggggtcatcccgacttaccaacccgatgcaaactgcgaataccggagaatgttatcacgggagacacacggcgggtgctaacgtccgtcgtgaagagggaaacaacccagaccgccagctaaggtcccaaagtcatggttaagtgggaaacgatgtgggaaggcccagacagccaggatgttggcttagaagcagccatcatttaaagaaagcgtaatagctcactggtcgagtcggcctgcgcggaagatgtaacggggctaaaccatgcaccgaagctgcggcagcgacgcttatgcgttgttgggtaggggagcgttctgtaagcctgcgaaggtgtgctgtgaggcatgctggaggtatcagaagtgcgaatgctgacataagtaacgataaagcgggtgaaaagcccgctcgccggaagaccaagggttcctgtccaacgttaatcggggcagggtgagtcgacccctaaggcgaggccgaaaggcgtagtcgatgggaaacaggttaatattcctgtacttggtgttactgcgaaggggggacggagaaggctatgttggccgggcgacggttgtcccggtttaagcgtgtaggctggttttccaggcaaatccggaaaatcaaggctgaggcgtgatgacgaggcactacggtgctgaagcaacaaatgccctgcttccaggaaaagcctctaagcatcaggtaacatcaaatcgtaccccaaaccgacacaggtggtcaggtagagaataccaaggcgcttgagagaactcgggtgaaggaactaggcaaaatggtgccgtaacttcgggagaaggcacgctgatatgtaggtgaggtccctcgcggatggagctgaaatcagtcgaagataccagctggctgcaactgtttattaaaaacacagcactgtgcaaacacgaaagtggacgtatacggtgtgacgcctgcccggtgccggaaggttaattgatggggttagcgcaagcgaagctcttgatcgaagccccggtaaacggcggccgtaactataacggtcctaaggtagcgaaattccttgtcgggtaagttccgacctgcacgaatggcgtaatgatggccaggctgtctccacccgagactcagtgaaattgaactcgctgtgaagatgcagtgtacccgcggcaagacggaaagaccccgtgaacctttactatagcttgacactgaacattgagccttgatgtgtaggataggtgggaggctttgaagtgtggacgccagtctgcatggagccgaccttgaaataccaccctttaatgtttgatgttctaacgttgacccgtaatccgggttgcggacagtgtctggtgggtagtttgactggggcggtctcctcctaaagagtaacggaggagcacgaaggttggctaatcctggtcggacatcaggaggttagtgcaatggcataagccagcttgactgcgagcgtgacggcgcgagcaggtgcgaaagcaggtcatagtgatccggtggttctgaatggaagggccatcgctcaacggataaaaggtactccggggataacaggctgataccgcccaagagttcatatcgacggcggtgtttggcacctcgatgtcggctcatcacatcctggggctgaagtaggtcccaagggtatggctgttcgccatttaaagtggtacgcgagctgggtttagaacgtcgtgagacagttcggtccctatctgccgtgggcgctggagaactgaggggggctgctcctagtacgagaggaccggagtggacgcatcactggtgttcgggttgtcatgccaatggcactgcccggtagctaaatgcggaagagataagtgctgaaagcatctaagcacgaaacttgccccgagatgagttctccctgaccctttaagggtcctgaaggaacgttgaagacgacgacgttgataggccgggtgtgtaaacggacatggttttcgggagggcgcttaccactttgtgattcatgactggggtgaagtcgtaacaaggtaaccgtaggggaacctgcggttggatcatgtggttaccttaaagaagcgtactttgtagtgctcacacagattgtctgatagaaagtgaaaagcaaggcgtttacgcgttgggagtgaggctgaagagaataaggccgttcgctttctattaatgaaagctcaccctacacgaaaatatcacgcaacgcgtgataagcaattttcgtgtccccttcgtctagaggcccaggacaccgccctttcacggcggtaacaggggttcgaatcccctaggggacgccacttgctggtttgtgagtgaaagtcgccgaccttaatatctcaaaactcatcttcgggtgatgtttgagatatttgctctttaaaaatctggatcaagctgaaaattgaaacactgaacaacgagagttgttcgtgagtctctcaaattttcgcaacacgatgatgaatcgaaaggcggatgagagaagattttcagcctgatacagattaaatcagaacgcagaagcggtctgataaaacagaatttgcctggcggcagtagcgcggtggtcccacctgaccccatgccgaactcagaagtgaaacgccgtagcgccgatggtagtgtggggtctccccatgcgagagtagggaactgccaggcatcaaataaaacgaaaggctcagtcgaaagactgggcctttcgttttatctgttgtttgtcggtgaacgctctcctgagtaggacaaatccgccgggagcggatttgaacgttgcgaagcaacggcccggagggtggcgggcaggacgcccgccataaactgccaggcatcaaattaagcagaaggccatcctgacggatggcctttttgcgtttctacaaactcttcctgtcgtcatatctacaagccggcgcgccgggaaatgtgcgcggaacccttatttgtttatttttctaaatacattcaaatatgtatccgctcatgagacaataaccctgataaatgcttcaataatattgaaaaaggaagagtatgagtattcaacatttccgtgtcgcccttattcccttttttgcggcattttgccttcctgtttttgctcacccagaaacgctggtgaaagtaaaagatgctgaagatcagttgggtgcacgagtgggttacatcgaactggatctcaacagcggtaagatccttgagagttttcgccccgaagaacgttttccaatgatgagcacttttaaagttctgctatgtggcgcggtattatcccgtgttgacgccgggcaagagcaactcggtcgccgcatacactattctcagaatgacttggttgagtactcaccagtcacagaaaagcatcttacggatggcatgacagtaagagaattatgcagtgctgcaataaccatgagtgataacactgcggccaacttacttctgacaacgatcggaggaccgaaggagctaaccgcttttttgcacaacatgggggatcatgtaactcgccttgatcgttgggaaccggagctgaatgaagccataccaaacgacgagcgtgacaccacgatgcctgcagcaatggcaacaacgttgcgcaaactattaactggcgaactacttactctagcttcccggcaacaattaatagactggatggaggcggataaagttgcaggaccacttctgcgctcggcccttccggctagctggtttattgctgataaatctggagccggtgagcgtgggtctcgcggtatcattgcagcactggggccagatggtaagccctcccgtatcgtagttatctacacgacggggagtcaggcaactatggatgaacgaaatagacagatcgctgagataggtgcctcactgattaagcattggtaactgcagaccaagtttactcatatatactttagattgatttaaaacttcatttttaatttaaaaggatctaggtgaagatcctttttgataatctcatgaccaaaatcccttaacgtgagttttcgttccactgagcgtcagaccccgtagaaaagatcaaaggatcttcttgagatcctttttttctgcgcgtaatctgctgcttgcaaacaaaaaaaccaccgctaccagcggtggtttgtttgccggatcaagagctaccaactctttttccgaaggtaactggcttcagcagagcgcagataccaaatactgtccttctagtgtagccgtagttaggccaccacttcaagaactctgtagcaccgcctacatacctcgctctgctaatcctgttaccagtggctgctgccagtggcgataagtcgtgtcttaccgggttggactcaagacgatagttaccggataaggcgcagcggtcgggctgaacggggggttcgtgcacacagcccagcttggagcgaacgacctacaccgaactgagatacctacagcgtgagctatgagaaagcgccacgcttcccgaagggagaaaggcggacaggtatccggtaagcggcagggtcggaacaggagagcgcacgagggagcttccagggggaaacgcctggtatctttatagtcctgtcgggtttcgccacctctgacttgagcgtcgatttttgtgatgctcgtcaggggggcggagcctatggaaaaacgccagcaacgcggcctttttacggttcctggccttttgctgg

SEQ ID NO: 369 - DNA, 7393 bp, Artificial
  Synthetic
agacttagggaccctgcggccgccattaattcctaatttttgttgacactctatcattgatagagttattttaccactccctatcagtgatagagaaaagtgaaatgaatagaccggccgctgagaaaaagcgaagcggcactgctctttaacaatttatcagacaatctgtgtgggcactcgaagatacggattcttaacgtcgcaagacgaaaaatgaataccaagtctcaagagtgaacacgtaattcattacgaagtttaattctttgagcgtcaaacttttaaattgaagagtttgatcatggctcagattgaacgctggcggcaggcctaacacatgcaagtcgagcggtagcacagagagcttgctctcgggtgacgagcggcggacgggtgagtaatgtctgggaaactgcctgatggagggggataactactggaaacggtagctaataccgcataacgtcgcaagaccaaagtgggggaccttcgggcctcatgccatcagatgtgcccagatgggattagctagtaggtggggtaatggctcacctaggcgacgatccctagctggtctgagaggatgaccagccacactggaactgagacacggtccagactcctacgggaggcagcagtggggaatattgcacaatgggcgcaagcctgatgcagccatgccgcgtgtatgaagaaggccttcgggttgtaaagtactttcagcgaggaggaaggcgttaaggttaataaccttggcgattgacgttactcgcagaagaagcaccggctaactccgtgccagcagccgcggtaatacggagggtgcaagcgttaatcggaattactgggcgtaaagcgcacgcaggcggtctgtcaagtcggatgtgaaatccccgggctcaacctgggaactgcattcgaaactggcaggctagagtcttgtagaggggggtagaattccaggtgtagcggtgaaatgcgtagagatctggaggaataccggtggcgaaggcggccccctggacaaagactgacgctcaggtgcgaaagcgtggggagcaaacaggattagataccctggtagtccacgccgtaaacgatgtcgacttggaggttgtgcccttgaggcgtggcttccggagctaacgcgttaagtcgaccgcctggggagtacggccgcaaggttaaaactcaaatgaattgacgggggcccgcacaagcggtggagcatgtggtttaattcgatgcaacgcgaagaaccttacctactcttgacatccagagaacttagcagagatgctttggtgccttcgggaactctgagacaggtgctgcatggctgtcgtcagctcgtgttgtgaaatgttgggttaagtcccgcaacgagcgcaacccttatcctttgttgccagcgattcggtcgggaactcaaaggagactgccagtgataaactggaggaaggtggggatgacgtcaagtcatcatggcccttacgagtagggctacacacgtgctacaatggcatatacaaagagaagcgacctcgcgagagcaagcggacctcataaagtatgtcgtagtccggattggagtctgcaactcgactccatgaagtcggaatcgctagtaatcgtagatcagaatgctacggtgaatacgttcccgggccttgtacacaccgcccgtcacaccatgggagtgggttgcaaaagaagtaggtagcttaaccggtcaacagccgtttgagctaaccggtactaatgaaccgtgaggcttaaccttgagaggttaagcgactaagcgtacacggtggatgccctggcagtcagaggcgatgaaggacgtgctaatctgcgataagcgtcggtaaggtgatatgaaccgttataaccggcgatttccgaatggggaaacccagtgtgtttcgacacactatcattaactgaatccataggttaatgaggcgaaccgggggaactgaaacatctaagtaccccgaggaaaagaaatcaaccgagattcccccagtagcggcgagcgaacggggagcagcccagagcctgaatcagtgtgtgtgttagtggaagcgtctggaaaggcgcgcgatacagggtgacagccccgtacacaaaaatgcacatgctgtgagctcgatgagtagggcgggacacgtggtatcctgtctgaatatggggggaccatcctccaaggctaaatactcctgactgaccgatagtgaaccagtaccgtgagggaaaggcgaaaagaaccccggcgaggggagtgaaaaagaacctgaaaccgtgtacgtacaagcagtgggagcacgcttaggcgtgtgactgcgtaccttttgtataatgggtcagcgacttatattctgtagcaaggttaaccgaataggggagccgaagggaaaccgagtcttaactgggcgttaagttgcagggtatagacccgaaacccggtgatctagccatgggcaggttgaaggttgggtaacactaactggaggaccgaaccgactaatgttgaaaaattagcggatgacttgtggctgggggtgaaaggccaatcaaaccgggagatagctggttctccccgaaagctatttaggtagcgcctcgtgaattcatctccgggggtagagcactgtttcggcaagggggtcatcccgacttaccaacccgatgcaaactgcgaataccggagaatgttatcacgggagacacacggcgggtgctaacgtccgtcgtgaagagggaaacaacccagaccgccagctaaggtcccaaagtcatggttaagtgggaaacgatgtgggaaggcccagacagccaggatgttggcttagaagcagccatcatttaaagaaagcgtaatagctcactggtcgagtcggcctgcgcggaagatgtaacggggctaaaccatgcaccgaagctgcggcagcgacgcttatgcgttgttgggtaggggagcgttctgtaagcctgcgaaggtgtgctgtgaggcatgctggaggtatcagaagtgcgaatgctgacataagtaacgataaagcgggtgaaaagcccgctcgccggaagaccaagggttcctgtccaacgttaatcggggcagggtgagtcgacccctaaggcgaggccgaaaggcgtagtcgatgggaaacaggttaatattcctgtacttggtgttactgcgaaggggggacggagaaggctatgttggccgggcgacggttgtcccggtttaagcgtgtaggctggttttccaggcaaatccggaaaatcaaggctgaggcgtgatgacgaggcactacggtgctgaagcaacaaatgccctgcttccaggaaaagcctctaagcatcaggtaacatcaaatcgtaccccaaaccgacacaggtggtcaggtagagaataccaaggcgcttgagagaactcgggtgaaggaactaggcaaaatggtgccgtaacttcgggagaaggcacgctgatatgtaggtgaggtccctcgcggatggagctgaaatcagtcgaagataccagctggctgcaactgtttattaaaaacacagcactgtgcaaacacgaaagtggacgtatacggtgtgacgcctgcccggtgccggaaggttaattgatggggttagcgcaagcgaagctcttgatcgaagccccggtaaacggcggccgtaactataacggtcctaaggtagcgaaattccttgtcgggtaagttccgacctgcacgaatggcgtaatgatggccaggctgtctccacccgagactcagtgaaattgaactcgctgtgaagatgcagtgtacccgcggcaagacggaaagaccccgtgaacctttactatagcttgacactgaacattgagccttgatgtgtaggataggtgggaggctttgaagtgtggacgccagtctgcatggagccgaccttgaaataccaccctttaatgtttgatgttctaacgttgacccgtaatccgggttgcggacagtgtctggtgggtagtttgactggggcggtctcctcctaaagagtaacggaggagcacgaaggttggctaatcctggtcggacatcaggaggttagtgcaatggcataagccagcttgactgcgagcgtgacggcgcgagcaggtgcgaaagcaggtcatagtgatccggtggttctgaatggaagggccatcgctcaacggataaaaggtactccggggataacaggctgataccgcccaagagttcatatcgacggcggtgtttggcacctcgatgtcggctcatcacatcctggggctgaagtaggtcccaagggtatggctgttcgccatttaaagtggtacgcgagctgggtttagaacgtcgtgagacagttcggtccctatctgccgtgggcgctggagaactgaggggggctgctcctagtacgagaggaccggagtggacgcatcactggtgttcgggttgtcatgccaatggcactgcccggtagctaaatgcggaagagataagtgctgaaagcatctaagcacgaaacttgccccgagatgagttctccctgaccctttaagggtcctgaaggaacgttgaagacgacgacgttgataggccgggtgtgtaaacggacatggttttcgggagggcgcttaccactttgtgattcatgactggggtgaagtcgtaacaaggtaaccgtaggggaacctgcggttggatcatgtggttaccttaaagaagcgtactttgtagtgctcacacagattgtctgatagaaagtgaaaagcaaggcgtttacgcgttgggagtgaggctgaagagaataaggccgttcgctttctattaatgaaagctcaccctacacgaaaatatcacgcaacgcgtgataagcaattttcgtgtccccttcgtctagaggcccaggacaccgccctttcacggcggtaacaggggttcgaatcccctaggggacgccacttgctggtttgtgagtgaaagtcgccgaccttaatatctcaaaactcatcttcgggtgatgtttgagatatttgctctttaaaaatctggatcaagctgaaaattgaaacactgaacaacgagagttgttcgtgagtctctcaaattttcgcaacacgatgatgaatcgaaaggcggatgagagaagattttcagcctgatacagattaaatcagaacgcagaagcggtctgataaaacagaatttgcctggcggcagtagcgcggtggtcccacctgaccccatgccgaactcagaagtgaaacgccgtagcgccgatggtagtgtggggtctccccatgcgagagtagggaactgccaggcatcaaataaaacgaaaggctcagtcgaaagactgggcctttcgttttatctgttgtttgtcggtgaacgctctcctgagtaggacaaatccgccgggagcggatttgaacgttgcgaagcaacggcccggagggtggcgggcaggacgcccgccataaactgccaggcatcaaattaagcagaaggccatcctgacggatggcctttttgcgtttctacaaactcttcctgtcgtcatatctacaagccggcgcgccgggaaatgtgcgcggaacccctatttgtttatttttctaaatacattcaaatatgtatccgctcatgagacaataaccctgataaatgcttcaataatattgaaaaaggaagagtatgagtattcaacatttccgtgtcgcccttattcccttttttgcggcattttgccttcctgtttttgctcacccagaaacgctggtgaaagtaaaagatgctgaagatcagttgggtgcacgagtgggttacatcgaactggatctcaacagcggtaagatccttgagagttttcgccccgaagaacgttttccaatgatgagcacttttaaagttctgctatgtggcgcggtattatcccgtgttgacgccgggcaagagcaactcggtcgccgcatacactattctcagaatgacttggttgagtactcaccagtcacagaaaagcatcttacggatggcatgacagtaagagaattatgcagtgctgcaataaccatgagtgataacactgcggccaacttacttctgacaacgatcggaggaccgaaggagctaaccgcttttttgcacaacatgggggatcatgtaactcgccttgatcgttgggaaccggagctgaatgaagccataccaaacgacgagcgtgacaccacgatgcctgcagcaatggcaacaacgttgcgcaaactattaactggcgaactacttactctagcttcccggcaacaattaatagactggatggaggcggataaagttgcaggaccacttctgcgctcggcccttccggctagctggtttattgctgataaatctggagccggtgagcgtgggtctcgcggtatcattgcagcactggggccagatggtaagccctcccgtatcgtagttatctacacgacggggagtcaggcaactatggatgaacgaaatagacagatcgctgagataggtgcctcactgattaagcattggtaactgcagaccaagtttactcatatatactttagattgatttaaaacttcatttttaatttaaaaggatctaggtgaagatcctttttgataatctcatgaccaaaatcccttaacgtgagttttcgttccactgagcgtcagaccccgtagaaaagatcaaaggatcttcttgagatcctttttttctgcgcgtaatctgctgcttgcaaacaaaaaaaccaccgctaccagcggtggtttgtttgccggatcaagagctaccaactctttttccgaaggtaactggcttcagcagagcgcagataccaaatactgtccttctagtgtagccgtagttaggccaccacttcaagaactctgtagcaccgcctacatacctcgctctgctaatcctgttaccagtggctgctgccagtggcgataagtcgtgtcttaccgggttggactcaagacgatagttaccggataaggcgcagcggtcgggctgaacggggggttcgtgcacacagcccagcttggagcgaacgacctacaccgaactgagatacctacagcgtgagctatgagaaagcgccacgcttcccgaagggagaaaggcggacaggtatccggtaagcggcagggtcggaacaggagagcgcacgagggagcttccagggggaaacgcctggtatctttatagtcctgtcgggtttcgccacctctgacttgagcgtcgatttttgtgatgctcgtcaggggggcggagcctatggaaaaacgccagcaacgcggcctttttacggttcctggccttttgctgg

SEQ ID NO: 370 - DNA, 7393 bp, Artificial
  Synthetic
agacttagggaccctgcggccgccattaattcctaatttttgttgacactctatcattgatagagttattttaccactccctatcagtgatagagaaaagtgaaatgaatagaccggccgctgagaaaaagcgaagcggcactgctctttaacaatttatcagacaatctgtgtgggcactcgaagatacggattcttaacgtcgcaagacgaaaaatgaataccaagtctcaagagtgaacacgtaattcattacgaagtttaattctttgagcgtcaaacttttaaattgaagagtttgatcatggctcagattgaacgctggcggcaggcctaacacatgcaagtcgagcggtagcacagagagcttgctctcgggtgacgagcggcggacgggtgagtaatgtctgggaaactgcctgatggagggggataactactggaaacggtagctaataccgcataacgtcgcaagaccaaagtgggggaccttcgggcctcatgccatcagatgtgcccagatgggattagctagtaggtggggtaacggctcacctaggcgacgatccctagctggtctgagaggatgaccagccacactggaactgagacacggtccagactcctacgggaggcagcagtggggaatattgcacaatgggcgcaagcctgatgcagccatgccgcgtgtgtgaagaaggccttcgggttgtaaagcactttcagcggggaggaaggcggtgaggttaataacctcatcgattgacgttacccgcagaagaagcaccggctaactccgtgccagcagccgcggtaatacggagggtgcaagcgttaatcggaattactgggcgtaaagcgcacgcaggcggtctgtcaagtcggatgtgaaatccccgggctcaacctgggaactgcattcgaaactggcaggctagagtcttgtagaggggggtagaattccaggtgtagcggtgaaatgcgtagagatctggaggaataccggtggcgaaggcggccccctggacaaagactgacgctcaggtgcgaaagcgtggggagcaaacaggattagataccctggtagtccacgccgtaaacgatgtcgatttggaggttgtgcccttgaggcgtggcttccggagctaacgcgttaaatcgaccgcctggggagtacggccgcaaggttaaaactcaaatgaattgacgggggcccgcacaagcggtggagcatgtggtttaattcgatgcaacgcgaagaaccttacctggtcttgacatccacagaactttccagagatggattggtgccttcgggaactgtgagacaggtgctgcatggctgtcgtcagctcgtgttgtgaaatgttgggttaagtcccgcaacgagcgcaacccttatcctttgttgccagcggttaggccgggaactcaaaggagactgccagtgataaactggaggaaggtggggatgacgtcaagtcatcatggcccttacgaccagggctacacacgtgctacaatggcatatacaaagagaagcgacctcgcgagagcaagcggacctcataaagtatgtcgtagtccggattggagtctgcaactcgactccatgaagtcggaatcgctagtaatcgtagatcagaatgctacggtgaatacgttcccgggccttgtacacaccgcccgtcacaccatgggagtgggttgcaaaagaagtaggtagcttaaccggtcaacagccgtttgagctaaccggtactaatgaaccgtgaggcttaaccttgagaggttaagcgactaagcgtacacggtggatgccctggcagtcagaggcgatgaaggacgtgctaatctgcgataagcgtcggtaaggtgatatgaaccgttataaccggcgatttccgaatggggaaacccagtgtgtttcgacacactatcattaactgaatccataggttaatgaggcgaaccgggggaactgaaacatctaagtaccccgaggaaaagaaatcaaccgagattcccccagtagcggcgagcgaacggggagcagcccagagcctgaatcagtgtgtgtgttagtggaagcgtctggaaaggcgcgcgatacagggtgacagccccgtacacaaaaatgcacatgctgtgagctcgatgagtagggcgggacacgtggtatcctgtctgaatatggggggaccatcctccaaggctaaatactcctgactgaccgatagtgaaccagtaccgtgagggaaaggcgaaaagaaccccggcgaggggagtgaaaaagaacctgaaaccgtgtacgtacaagcagtgggagcacgcttaggcgtgtgactgcgtaccttttgtataatgggtcagcgacttatattctgtagcaaggttaaccgaataggggagccgaagggaaaccgagtcttaactgggcgttaagttgcagggtatagacccgaaacccggtgatctagccatgggcaggttgaaggttgggtaacactaactggaggaccgaaccgactaatgttgaaaaattagcggatgacttgtggctgggggtgaaaggccaatcaaaccgggagatagctggttctccccgaaagctatttaggtagcgcctcgtgaattcatctccgggggtagagcactgtttcggcaagggggtcatcccgacttaccaacccgatgcaaactgcgaataccggagaatgttatcacgggagacacacggcgggtgctaacgtccgtcgtgaagagggaaacaacccagaccgccagctaaggtcccaaagtcatggttaagtgggaaacgatgtgggaaggcccagacagccaggatgttggcttagaagcagccatcatttaaagaaagcgtaatagctcactggtcgagtcggcctgcgcggaagatgtaacggggctaaaccatgcaccgaagctgcggcagcgacgcttatgcgttgttgggtaggggagcgttctgtaagcctgcgaaggtgtgctgtgaggcatgctggaggtatcagaagtgcgaatgctgacataagtaacgataaagcgggtgaaaagcccgctcgccggaagaccaagggttcctgtccaacgttaatcggggcagggtgagtcgacccctaaggcgaggccgaaaggcgtagtcgatgggaaacaggttaatattcctgtacttggtgttactgcgaaggggggacggagaaggctatgttggccgggcgacggttgtcccggtttaagcgtgtaggctggttttccaggcaaatccggaaaatcaaggctgaggcgtgatgacgaggcactacggtgctgaagcaacaaatgccctgcttccaggaaaagcctctaagcatcaggtaacatcaaatcgtaccccaaaccgacacaggtggtcaggtagagaataccaaggcgcttgagagaactcgggtgaaggaactaggcaaaatggtgccgtaacttcgggagaaggcacgctgatatgtaggtgaggtccctcgcggatggagctgaaatcagtcgaagataccagctggctgcaactgtttattaaaaacacagcactgtgcaaacacgaaagtggacgtatacggtgtgacgcctgcccggtgccggaaggttaattgatggggttagcgcaagcgaagctcttgatcgaagccccggtaaacggcggccgtaactataacggtcctaaggtagcgaaattccttgtcgggtaagttccgacctgcacgaatggcgtaatgatggccaggctgtctccacccgagactcagtgaaattgaactcgctgtgaagatgcagtgtacccgcggcaagacggaaagaccccgtgaacctttactatagcttgacactgaacattgagccttgatgtgtaggataggtgggaggctttgaagtgtggacgccagtctgcatggagccgaccttgaaataccaccctttaatgtttgatgttctaacgttgacccgtaatccgggttgcggacagtgtctggtgggtagtttgactggggcggtctcctcctaaagagtaacggaggagcacgaaggttggctaatcctggtcggacatcaggaggttagtgcaatggcataagccagcttgactgcgagcgtgacggcgcgagcaggtgcgaaagcaggtcatagtgatccggtggttctgaatggaagggccatcgctcaacggataaaaggtactccggggataacaggctgataccgcccaagagttcatatcgacggcggtgtttggcacctcgatgtcggctcatcacatcctggggctgaagtaggtcccaagggtatggctgttcgccatttaaagtggtacgcgagctgggtttagaacgtcgtgagacagttcggtccctatctgccgtgggcgctggagaactgaggggggctgctcctagtacgagaggaccggagtggacgcatcactggtgttcgggttgtcatgccaatggcactgcccggtagctaaatgcggaagagataagtgctgaaagcatctaagcacgaaacttgccccgagatgagttctccctgaccctttaagggtcctgaaggaacgttgaagacgacgacgttgataggccgggtgtgtaaacggacatggttttcgggagggcgcttaccactttgtgattcatgactggggtgaagtcgtaacaaggtaaccgtaggggaacctgcggttggatcatgtggttaccttaaagaagcgtactttgtagtgctcacacagattgtctgatagaaagtgaaaagcaaggcgtttacgcgttgggagtgaggctgaagagaataaggccgttcgctttctattaatgaaagctcaccctacacgaaaatatcacgcaacgcgtgataagcaattttcgtgtccccttcgtctagaggcccaggacaccgccctttcacggcggtaacaggggttcgaatcccctaggggacgccacttgctggtttgtgagtgaaagtcgccgaccttaatatctcaaaactcatcttcgggtgatgtttgagatatttgctctttaaaaatctggatcaagctgaaaattgaaacactgaacaacgagagttgttcgtgagtctctcaaattttcgcaacacgatgatgaatcgaaaggcggatgagagaagattttcagcctgatacagattaaatcagaacgcagaagcggtctgataaaacagaatttgcctggcggcagtagcgcggtggtcccacctgaccccatgccgaactcagaagtgaaacgccgtagcgccgatggtagtgtggggtctccccatgcgagagtagggaactgccaggcatcaaataaaacgaaaggctcagtcgaaagactgggcctttcgttttatctgttgtttgtcggtgaacgctctcctgagtaggacaaatccgccgggagcggatttgaacgttgcgaagcaacggcccggagggtggcgggcaggacgcccgccataaactgccaggcatcaaattaagcagaaggccatcctgacggatggcctttttgcgtttctacaaactcttcctgtcgtcatatctacaagccggcgcgccgggaaatgtgcgcggaacccctatttgtttatttttctaaatacattcaaatatgtatccgctcatgagacaataaccctgataaatgcttcaataatattgaaaaaggaagagtatgagtattcaacatttccgtgtcgcccttattcccttttttgcggcattttgccttcctgtttttgctcacccagaaacgctggtgaaagtaaaagatgctgaagatcagttgggtgcacgagtgggttacatcgaactggatctcaacagcggtaagatccttgagagttttcgccccgaagaacgttttccaatgatgagcacttttaaagttctgctatgtggcgcggtattatcccgtgttgacgccgggcaagagcaactcggtcgccgcatacactattctcagaatgacttggttgagtactcaccagtcacagaaaagcatcttacggatggcatgacagtaagagaattatgcagtgctgcaataaccatgagtgataacactgcggccaacttacttctgacaacgatcggaggaccgaaggagctaaccgcttttttgcacaacatgggggatcatgtaactcgccttgatcgttgggaaccggagctgaatgaagccataccaaacgacgagcgtgacaccacgatgcctgcagcaatggcaacaacgttgcgcaaactattaactggcgaactacttactctagcttcccggcaacaattaatagactggatggaggcggataaagttgcaggaccacttctgcgctcggcccttccggctagctggtttattgctgataaatctggagccggtgagcgtgggtctcgcggtatcattgcagcactggggccagatggtaagccctcccgtatcgtagttatctacacgacggggagtcaggcaactatggatgaacgaaatagacagatcgctgagataggtgcctcactgattaagcattggtaactgcagaccaagtttactcatatatactttagattgatttaaaacttcatttttaatttaaaaggatctaggtgaagatcctttttgataatctcatgaccaaaatcccttaacgtgagttttcgttccactgagcgtcagaccccgtagaaaagatcaaaggatcttcttgagatcctttttttctgcgcgtaatctgctgcttgcaaacaaaaaaaccaccgctaccagcggtggtttgtttgccggatcaagagctaccaactctttttccgaaggtaactggcttcagcagagcgcagataccaaatactgtccttctagtgtagccgtagttaggccaccacttcaagaactctgtagcaccgcctacatacctcgctctgctaatcctgttaccagtggctgctgccagtggcgataagtcgtgtcttaccgggttggactcaagacgatagttaccggataaggcgcagcggtcgggctgaacggggggttcgtgcacacagcccagcttggagcgaacgacctacaccgaactgagatacctacagcgtgagctatgagaaagcgccacgcttcccgaagggagaaaggcggacaggtatccggtaagcggcagggtcggaacaggagagcgcacgagggagcttccagggggaaacgcctggtatctttatagtcctgtcgggtttcgccacctctgacttgagcgtcgatttttgtgatgctcgtcaggggggcggagcctatggaaaaacgccagcaacgcggcctttttacggttcctggccttttgctgg

SEQ ID NO: 371 - DNA, 7393 bp, Artificial
  Synthetic
agacttagggaccctgcggccgccattaattcctaatttttgttgacactctatcattgatagagttattttaccactccctatcagtgatagagaaaagtgaaatgaatagaccggccgctgagaaaaagcgaagcggcactgctctttaacaatttatcagacaatctgtgtgggcactcgaagatacggattcttaacgtcgcaagacgaaaaatgaataccaagtctcaagagtgaacacgtaattcattacgaagtttaattctttgagcgtcaaacttttaaattgaagagtttgatcatggctcagattgaacgctggcggcaggcctaacacatgcaagtcgaacggtagcacagagagcttgctctcgggtgacgagtggcggacgggtgagtaatgtctgggaaactgcccgatggagggggataactactggaaacggtagctaataccgcataacgtcgcaagaccaaagagggggaccttcgggcctcttgccatcggatgtgcccagatgggattagcttgtaggtgaggtaacggctcacctaggcgacgatccctagctggtctgagaggatgaccagccacactggaactgagacacggtccagactcctacgggaggcagcagtggggaatattgcacaatgggcgcaagcctgatgcagccatgccgcgtgtatgaagaaggccttcgggttgtaaagtactttcagcggggaggaagggagtgaggttaataacctcattcattgacgttacccgcagaagaagcaccggctaactccgtgccagcagccgcggtaatacggagggtgcaagcgttaatcggaattactgggcgtaaagcgcacgcaggcggtctgtcaagtcggatgtgaaatccccgggctcaacctgggaactgcattcgaaactggcaggctggagtcttgtagaggggggtagaattccaggtgtagcggtgaaatgcgtagagatctggaggaataccggtggcgaaggcggccccctggacaaagactgacgctcaggtgcgaaagcgtggggagcaaacaggattagataccctggtagtccacgctgtaaacgatgtcgacttggaggttgttcccttgaggagtggcttccggagctaacgcgttaagtcgaccgcctggggagtacggccgcaaggttaaaactcaaatgaattgacgggggcccgcacaagcggtggagcatgtggtttaattcgatgcaacgcgaagaaccttacctactcttgacatccagagaacttagcagagatgctttggtgccttcgggaactctgagacaggtgctgcatggctgtcgtcagctcgtgttgtgaaatgttgggttaagtcccgcaacgagcgcaacccttatcctttgttgccagcgattcggtcgggaactcaaaggagactgccagtgataaactggaggaaggtggggatgacgtcaagtcatcatggcccttacgagtagggctacacacgtgctacaatggcatatacaaagagaagcgacctcgcgagagcaagcggacctcataaagtatgtcgtagtccggattggagtctgcaactcgactccatgaagtcggaatcgctagtaatcgtggatcagaatgccacggtgaatacgttcccgggccttgtacacaccgcccgtcacaccatgggagtgggttgcaaaagaagtaggtagcttaaccggtcaacagccgtttgagctaaccggtactaatgaaccgtgaggcttaaccttgagaggttaagcgactaagcgtacacggtggatgccctggcagtcagaggcgatgaaggacgtgctaatctgcgataagcgtcggtaaggtgatatgaaccgttataaccggcgatttccgaatggggaaacccagtgtgtttcgacacactatcattaactgaatccataggttaatgaggcgaaccgggggaactgaaacatctaagtaccccgaggaaaagaaatcaaccgagattcccccagtagcggcgagcgaacggggagcagcccagagcctgaatcagtgtgtgtgttagtggaagcgtctggaaaggcgcgcgatacagggtgacagccccgtacacaaaaatgcacatgctgtgagctcgatgagtagggcgggacacgtggtatcctgtctgaatatggggggaccatcctccaaggctaaatactcctgactgaccgatagtgaaccagtaccgtgagggaaaggcgaaaagaaccccggcgaggggagtgaaaaagaacctgaaaccgtgtacgtacaagcagtgggagcacgcttaggcgtgtgactgcgtaccttttgtataatgggtcagcgacttatattctgtagcaaggttaaccgaataggggagccgaagggaaaccgagtcttaactgggcgttaagttgcagggtatagacccgaaacccggtgatctagccatgggcaggttgaaggttgggtaacactaactggaggaccgaaccgactaatgttgaaaaattagcggatgacttgtggctgggggtgaaaggccaatcaaaccgggagatagctggttctccccgaaagctatttaggtagcgcctcgtgaattcatctccgggggtagagcactgtttcggcaagggggtcatcccgacttaccaacccgatgcaaactgcgaataccggagaatgttatcacgggagacacacggcgggtgctaacgtccgtcgtgaagagggaaacaacccagaccgccagctaaggtcccaaagtcatggttaagtgggaaacgatgtgggaaggcccagacagccaggatgttggcttagaagcagccatcatttaaagaaagcgtaatagctcactggtcgagtcggcctgcgcggaagatgtaacggggctaaaccatgcaccgaagctgcggcagcgacgcttatgcgttgttgggtaggggagcgttctgtaagcctgcgaaggtgtgctgtgaggcatgctggaggtatcagaagtgcgaatgctgacataagtaacgataaagcgggtgaaaagcccgctcgccggaagaccaagggttcctgtccaacgttaatcggggcagggtgagtcgacccctaaggcgaggccgaaaggcgtagtcgatgggaaacaggttaatattcctgtacttggtgttactgcgaaggggggacggagaaggctatgttggccgggcgacggttgtcccggtttaagcgtgtaggctggttttccaggcaaatccggaaaatcaaggctgaggcgtgatgacgaggcactacggtgctgaagcaacaaatgccctgcttccaggaaaagcctctaagcatcaggtaacatcaaatcgtaccccaaaccgacacaggtggtcaggtagagaataccaaggcgcttgagagaactcgggtgaaggaactaggcaaaatggtgccgtaacttcgggagaaggcacgctgatatgtaggtgaggtccctcgcggatggagctgaaatcagtcgaagataccagctggctgcaactgtttattaaaaacacagcactgtgcaaacacgaaagtggacgtatacggtgtgacgcctgcccggtgccggaaggttaattgatggggttagcgcaagcgaagctcttgatcgaagccccggtaaacggcggccgtaactataacggtcctaaggtagcgaaattccttgtcgggtaagttccgacctgcacgaatggcgtaatgatggccaggctgtctccacccgagactcagtgaaattgaactcgctgtgaagatgcagtgtacccgcggcaagacggaaagaccccgtgaacctttactatagcttgacactgaacattgagccttgatgtgtaggataggtgggaggctttgaagtgtggacgccagtctgcatggagccgaccttgaaataccaccctttaatgtttgatgttctaacgttgacccgtaatccgggttgcggacagtgtctggtgggtagtttgactggggcggtctcctcctaaagagtaacggaggagcacgaaggttggctaatcctggtcggacatcaggaggttagtgcaatggcataagccagcttgactgcgagcgtgacggcgcgagcaggtgcgaaagcaggtcatagtgatccggtggttctgaatggaagggccatcgctcaacggataaaaggtactccggggataacaggctgataccgcccaagagttcatatcgacggcggtgtttggcacctcgatgtcggctcatcacatcctggggctgaagtaggtcccaagggtatggctgttcgccatttaaagtggtacgcgagctgggtttagaacgtcgtgagacagttcggtccctatctgccgtgggcgctggagaactgaggggggctgctcctagtacgagaggaccggagtggacgcatcactggtgttcgggttgtcatgccaatggcactgcccggtagctaaatgcggaagagataagtgctgaaagcatctaagcacgaaacttgccccgagatgagttctccctgaccctttaagggtcctgaaggaacgttgaagacgacgacgttgataggccgggtgtgtaaacggacatggttttcgggagggcgcttaccactttgtgattcatgactggggtgaagtcgtaacaaggtaaccgtaggggaacctgcggttggatcatgtggttaccttaaagaagcgtactttgtagtgctcacacagattgtctgatagaaagtgaaaagcaaggcgtttacgcgttgggagtgaggctgaagagaataaggccgttcgctttctattaatgaaagctcaccctacacgaaaatatcacgcaacgcgtgataagcaattttcgtgtccccttcgtctagaggcccaggacaccgccctttcacggcggtaacaggggttcgaatcccctaggggacgccacttgctggtttgtgagtgaaagtcgccgaccttaatatctcaaaactcatcttcgggtgatgtttgagatatttgctctttaaaaatctggatcaagctgaaaattgaaacactgaacaacgagagttgttcgtgagtctctcaaattttcgcaacacgatgatgaatcgaaaggcggatgagagaagattttcagcctgatacagattaaatcagaacgcagaagcggtctgataaaacagaatttgcctggcggcagtagcgcggtggtcccacctgaccccatgccgaactcagaagtgaaacgccgtagcgccgatggtagtgtggggtctccccatgcgagagtagggaactgccaggcatcaaataaaacgaaaggctcagtcgaaagactgggcctttcgttttatctgttgtttgtcggtgaacgctctcctgagtaggacaaatccgccgggagcggatttgaacgttgcgaagcaacggcccggagggtggcgggcaggacgcccgccataaactgccaggcatcaaattaagcagaaggccatcctgacggatggcctttttgcgtttctacaaactcttcctgtcgtcatatctacaagccggcgcgccgggaaatgtgcgcggaacccctatttgtttatttttctaaatacattcaaatatgtatccgctcatgagacaataaccctgataaatgcttcaataatattgaaaaaggaagagtatgagtattcaacatttccgtgtcgcccttattcccttttttgcggcattttgccttcctgtttttgctcacccagaaacgctggtgaaagtaaaagatgctgaagatcagttgggtgcacgagtgggttacatcgaactggatctcaacagcggtaagatccttgagagttttcgccccgaagaacgttttccaatgatgagcacttttaaagttctgctatgtggcgcggtattatcccgtgttgacgccgggcaagagcaactcggtcgccgcatacactattctcagaatgacttggttgagtactcaccagtcacagaaaagcatcttacggatggcatgacagtaagagaattatgcagtgctgcaataaccatgagtgataacactgcggccaacttacttctgacaacgatcggaggaccgaaggagctaaccgcttttttgcacaacatgggggatcatgtaactcgccttgatcgttgggaaccggagctgaatgaagccataccaaacgacgagcgtgacaccacgatgcctgcagcaatggcaacaacgttgcgcaaactattaactggcgaactacttactctagcttcccggcaacaattaatagactggatggaggcggataaagttgcaggaccacttctgcgctcggcccttccggctagctggtttattgctgataaatctggagccggtgagcgtgggtctcgcggtatcattgcagcactggggccagatggtaagccctcccgtatcgtagttatctacacgacggggagtcaggcaactatggatgaacgaaatagacagatcgctgagataggtgcctcactgattaagcattggtaactgcagaccaagtttactcatatatactttagattgatttaaaacttcatttttaatttaaaaggatctaggtgaagatcctttttgataatctcatgaccaaaatcccttaacgtgagttttcgttccactgagcgtcagaccccgtagaaaagatcaaaggatcttcttgagatcctttttttctgcgcgtaatctgctgcttgcaaacaaaaaaaccaccgctaccagcggtggtttgtttgccggatcaagagctaccaactctttttccgaaggtaactggcttcagcagagcgcagataccaaatactgtccttctagtgtagccgtagttaggccaccacttcaagaactctgtagcaccgcctacatacctcgctctgctaatcctgttaccagtggctgctgccagtggcgataagtcgtgtcttaccgggttggactcaagacgatagttaccggataaggcgcagcggtcgggctgaacggggggttcgtgcacacagcccagcttggagcgaacgacctacaccgaactgagatacctacagcgtgagctatgagaaagcgccacgcttcccgaagggagaaaggcggacaggtatccggtaagcggcagggtcggaacaggagagcgcacgagggagcttccagggggaaacgcctggtatctttatagtcctgtcgggtttcgccacctctgacttgagcgtcgatttttgtgatgctcgtcaggggggcggagcctatggaaaaacgccagcaacgcggcctttttacggttcctggccttttgctgg

SEQ ID NO: 372 - DNA, 7395 bp, Artificial
  Synthetic
agacttagggaccctgcggccgccattaattcctaatttttgttgacactctatcattgatagagttattttaccactccctatcagtgatagagaaaagtgaaatgaatagaccggccgctgagaaaaagcgaagcggcactgctctttaacaatttatcagacaatctgtgtgggcactcgaagatacggattcttaacgtcgcaagacgaaaaatgaataccaagtctcaagagtgaacacgtaattcattacgaagtttaattctttgagcgtcaaacttttaaattgaagagtttgatcatggctcagattgaacgctggcggcaggcctaacacatgcaagtcgaacggtaacaggaagcagcttgctgcttcgctgacgagtggcggacgggtgagtaatgtctgggaaactgcctgatggagggggataactactggaaacggtagctaataccgcataacgtcgcaagaccaaagagggggaccttcgggcctcttgccatcggatgtgcccagatgggattagctagtaggtggggtaacggctcacctaggcgacgatccctagctggtctgagaggatgaccagccacactggaactgagacacggtccagactcctacgggaggcagcagtggggaatattgcacaatgggcgcaagcctgatgcagccatgccgcgtgtatgaagaaggccttcgggttgtaaagtactttcagcggggaggaaggcgataaggttaataaccttgtcgattgacgttacccgcagaagaagcaccggctaactccgtgccagcagccgcggtaatacggagggtgcaagcgttaatcggaattactgggcgtaaagcgcacgcaggcggtctgtcaagtcggatgtgaaatccccgggctcaacctgggaactgcattcgaaactggcaggctagagtcttgtagaggggggtagaattccaggtgtagcggtgaaatgcgtagagatctggaggaataccggtggcgaaggcggccccctggacaaagactgacgctcaggtgcgaaagcgtggggagcaaacaggattagataccctggtagtccacgccgtaaacgatgtcgacttggaggttgtgcccttgaggcgtggcttccggagctaacgcgttaagtcgaccgcctggggagtacggccgcaaggttaaaactcaaatgaattgacgggggcccgcacaagcggtggagcatgtggtttaattcgatgcaacgcgaagaaccttacctactcttgacatccagagaacttagcagagatgctttggtgccttcgggaactctgagacaggtgctgcatggctgtcgtcagctcgtgttgtgaaatgttgggttaagtcccgcaacgagcgcaacccttatcctttgttgccagcggtccggccgggaactcaaaggagactgccagtgataaactggaggaaggtggggatgacgtcaagtcatcatggcccttacgagtagggctacacacgtgctacaatggcgcatacaaagagaagcgacctcgcgagagcaagcggacctcataaagtgcgtcgtagtccggattggagtctgcaactcgactccatgaagtcggaatcgctagtaatcgtggatcagaatgccacggtgaatacgttcccgggccttgtacacaccgcccgtcacaccatgggagtgggttgcaaaagaagtaggtagcttaaccggtcaacagccgtttgagctaaccggtactaatgaaccgtgaggcttaaccttgagaggttaagcgactaagcgtacacggtggatgccctggcagtcagaggcgatgaaggacgtgctaatctgcgataagcgtcggtaaggtgatatgaaccgttataaccggcgatttccgaatggggaaacccagtgtgtttcgacacactatcattaactgaatccataggttaatgaggcgaaccgggggaactgaaacatctaagtaccccgaggaaaagaaatcaaccgagattcccccagtagcggcgagcgaacggggagcagcccagagcctgaatcagtgtgtgtgttagtggaagcgtctggaaaggcgcgcgatacagggtgacagccccgtacacaaaaatgcacatgctgtgagctcgatgagtagggcgggacacgtggtatcctgtctgaatatggggggaccatcctccaaggctaaatactcctgactgaccgatagtgaaccagtaccgtgagggaaaggcgaaaagaaccccggcgaggggagtgaaaaagaacctgaaaccgtgtacgtacaagcagtgggagcacgcttaggcgtgtgactgcgtaccttttgtataatgggtcagcgacttatattctgtagcaaggttaaccgaataggggagccgaagggaaaccgagtcttaactgggcgttaagttgcagggtatagacccgaaacccggtgatctagccatgggcaggttgaaggttgggtaacactaactggaggaccgaaccgactaatgttgaaaaattagcggatgacttgtggctgggggtgaaaggccaatcaaaccgggagatagctggttctccccgaaagctatttaggtagcgcctcgtgaattcatctccgggggtagagcactgtttcggcaagggggtcatcccgacttaccaacccgatgcaaactgcgaataccggagaatgttatcacgggagacacacggcgggtgctaacgtccgtcgtgaagagggaaacaacccagaccgccagctaaggtcccaaagtcatggttaagtgggaaacgatgtgggaaggcccagacagccaggatgttggcttagaagcagccatcatttaaagaaagcgtaatagctcactggtcgagtcggcctgcgcggaagatgtaacggggctaaaccatgcaccgaagctgcggcagcgacgcttatgcgttgttgggtaggggagcgttctgtaagcctgcgaaggtgtgctgtgaggcatgctggaggtatcagaagtgcgaatgctgacataagtaacgataaagcgggtgaaaagcccgctcgccggaagaccaagggttcctgtccaacgttaatcggggcagggtgagtcgacccctaaggcgaggccgaaaggcgtagtcgatgggaaacaggttaatattcctgtacttggtgttactgcgaaggggggacggagaaggctatgttggccgggcgacggttgtcccggtttaagcgtgtaggctggttttccaggcaaatccggaaaatcaaggctgaggcgtgatgacgaggcactacggtgctgaagcaacaaatgccctgcttccaggaaaagcctctaagcatcaggtaacatcaaatcgtaccccaaaccgacacaggtggtcaggtagagaataccaaggcgcttgagagaactcgggtgaaggaactaggcaaaatggtgccgtaacttcgggagaaggcacgctgatatgtaggtgaggtccctcgcggatggagctgaaatcagtcgaagataccagctggctgcaactgtttattaaaaacacagcactgtgcaaacacgaaagtggacgtatacggtgtgacgcctgcccggtgccggaaggttaattgatggggttagcgcaagcgaagctcttgatcgaagccccggtaaacggcggccgtaactataacggtcctaaggtagcgaaattccttgtcgggtaagttccgacctgcacgaatggcgtaatgatggccaggctgtctccacccgagactcagtgaaattgaactcgctgtgaagatgcagtgtacccgcggcaagacggaaagaccccgtgaacctttactatagcttgacactgaacattgagccttgatgtgtaggataggtgggaggctttgaagtgtggacgccagtctgcatggagccgaccttgaaataccaccctttaatgtttgatgttctaacgttgacccgtaatccgggttgcggacagtgtctggtgggtagtttgactggggcggtctcctcctaaagagtaacggaggagcacgaaggttggctaatcctggtcggacatcaggaggttagtgcaatggcataagccagcttgactgcgagcgtgacggcgcgagcaggtgcgaaagcaggtcatagtgatccggtggttctgaatggaagggccatcgctcaacggataaaaggtactccggggataacaggctgataccgcccaagagttcatatcgacggcggtgtttggcacctcgatgtcggctcatcacatcctggggctgaagtaggtcccaagggtatggctgttcgccatttaaagtggtacgcgagctgggtttagaacgtcgtgagacagttcggtccctatctgccgtgggcgctggagaactgaggggggctgctcctagtacgagaggaccggagtggacgcatcactggtgttcgggttgtcatgccaatggcactgcccggtagctaaatgcggaagagataagtgctgaaagcatctaagcacgaaacttgccccgagatgagttctccctgaccctttaagggtcctgaaggaacgttgaagacgacgacgttgataggccgggtgtgtaaacggacatggttttcgggagggcgcttaccactttgtgattcatgactggggtgaagtcgtaacaaggtaaccgtaggggaacctgcggttggatcatgtggttaccttaaagaagcgtactttgtagtgctcacacagattgtctgatagaaagtgaaaagcaaggcgtttacgcgttgggagtgaggctgaagagaataaggccgttcgctttctattaatgaaagctcaccctacacgaaaatatcacgcaacgcgtgataagcaattttcgtgtccccttcgtctagaggcccaggacaccgccctttcacggcggtaacaggggttcgaatcccctaggggacgccacttgctggtttgtgagtgaaagtcgccgaccttaatatctcaaaactcatcttcgggtgatgtttgagatatttgctctttaaaaatctggatcaagctgaaaattgaaacactgaacaacgagagttgttcgtgagtctctcaaattttcgcaacacgatgatgaatcgaaaggcggatgagagaagattttcagcctgatacagattaaatcagaacgcagaagcggtctgataaaacagaatttgcctggcggcagtagcgcggtggtcccacctgaccccatgccgaactcagaagtgaaacgccgtagcgccgatggtagtgtggggtctccccatgcgagagtagggaactgccaggcatcaaataaaacgaaaggctcagtcgaaagactgggcctttcgttttatctgttgtttgtcggtgaacgctctcctgagtaggacaaatccgccgggagcggatttgaacgttgcgaagcaacggcccggagggtggcgggcaggacgcccgccataaactgccaggcatcaaattaagcagaaggccatcctgacggatggcctttttgcgtttctacaaactcttcctgtcgtcatatctacaagccggcgcgccgggaaatgtgcgcggaacccctatttgtttatttttctaaatacattcaaatatgtatccgctcatgagacaataaccctgataaatgcttcaataatattgaaaaaggaagagtatgagtattcaacatttccgtgtcgcccttattcccttttttgcggcattttgccttcctgtttttgctcacccagaaacgctggtgaaagtaaaagatgctgaagatcagttgggtgcacgagtgggttacatcgaactggatctcaacagcggtaagatccttgagagttttcgccccgaagaacgttttccaatgatgagcacttttaaagttctgctatgtggcgcggtattatcccgtgttgacgccgggcaagagcaactcggtcgccgcatacactattctcagaatgacttggttgagtactcaccagtcacagaaaagcatcttacggatggcatgacagtaagagaattatgcagtgctgcaataaccatgagtgataacactgcggccaacttacttctgacaacgatcggaggaccgaaggagctaaccgcttttttgcacaacatgggggatcatgtaactcgccttgatcgttgggaaccggagctgaatgaagccataccaaacgacgagcgtgacaccacgatgcctgcagcaatggcaacaacgttgcgcaaactattaactggcgaactacttactctagcttcccggcaacaattaatagactggatggaggcggataaagttgcaggaccacttctgcgctcggcccttccggctagctggtttattgctgataaatctggagccggtgagcgtgggtctcgcggtatcattgcagcactggggccagatggtaagccctcccgtatcgtagttatctacacgacggggagtcaggcaactatggatgaacgaaatagacagatcgctgagataggtgcctcactgattaagcattggtaactgcagaccaagtttactcatatatactttagattgatttaaaacttcatttttaatttaaaaggatctaggtgaagatcctttttgataatctcatgaccaaaatcccttaacgtgagttttcgttccactgagcgtcagaccccgtagaaaagatcaaaggatcttcttgagatcctttttttctgcgcgtaatctgctgcttgcaaacaaaaaaaccaccgctaccagcggtggtttgtttgccggatcaagagctaccaactctttttccgaaggtaactggcttcagcagagcgcagataccaaatactgtccttctagtgtagccgtagttaggccaccacttcaagaactctgtagcaccgcctacatacctcgctctgctaatcctgttaccagtggctgctgccagtggcgataagtcgtgtcttaccgggttggactcaagacgatagttaccggataaggcgcagcggtcgggctgaacggggggttcgtgcacacagcccagcttggagcgaacgacctacaccgaactgagatacctacagcgtgagctatgagaaagcgccacgcttcccgaagggagaaaggcggacaggtatccggtaagcggcagggtcggaacaggagagcgcacgagggagcttccagggggaaacgcctggtatctttatagtcctgtcgggtttcgccacctctgacttgagcgtcgatttttgtgatgctcgtcaggggggcggagcctatggaaaaacgccagcaacgcggcctttttacggttcctggccttttgctgg

SEQ ID NO: 373 - DNA, 7395 bp, Artificial
  Synthetic
agacttagggaccctgcggccgccattaattcctaatttttgttgacactctatcattgatagagttattttaccactccctatcagtgatagagaaaagtgaaatgaatagaccggccgctgagaaaaagcgaagcggcactgctctttaacaatttatcagacaatctgtgtgggcactcgaagatacggattcttaacgtcgcaagacgaaaaatgaataccaagtctcaagagtgaacacgtaattcattacgaagtttaattctttgagcgtcaaactttttaattgaagagtttgatcatggctcagattgaacgctggcggcaggcttaacacatgcaagtcgagcggtagcacaggggagcttgctccctgggtgacgagcggcggacgggtgagtaatgtctgggaaactgcctgatggagggggataactactggaaacggtagctaataccgcataacgtcgcaagaccaaagagggggaccttcgggcctcttgccatcagatgtgcccagatgggattagctagtaggtggggtaatggctcacctaggcgacgatccctagctggtctgagaggatgaccagccacactggaactgagacacggtccagactcctacgggaggcagcagtggggaatattgcacaatgggcgcaagcctgatgcagccatgccgcgtgtgtgaagaaggccttcgggttgtaaagcactttcagcgaggaggaaggtggtgagcttaatacgctcatcaattgacgttactcgcagaagaagcaccggctaactccgtgccagcagccgcggtaatacggagggtgcaagcgttaatcggaattactgggcgtaaagcgcacgcaggcggtttgttaagtcagatgtgaaatccccgggctcaacctgggaactgcatttgaaactggcaagctagagtctcgtagaggggggtagaattccaggtgtagcggtgaaatgcgtagagatctggaggaataccggtggcgaaggcggccccctggacgaagactgacgctcaggtgcgaaagcgtggggagcaaacaggattagataccctggtagtccacgctgtaaacgatgtcgatttggaggttgtgcccttgaggcgtggcttccggagctaacgcgttaaatcgaccgcctggggagtacggccgcaaggttaaaactcaaatgaattgacgggggcccgcacaagcggtggagcatgtggtttaattcgatgcaacgcgaagaaccttacctactcttgacatccagagaacttagcagagatgctttggtgccttcgggaactctgagacaggtgctgcatggctgtcgtcagctcgtgttgtgaaatgttgggttaagtcccgcaacgagcgcaacccttatcctttgttgccagcggttcggccgggaactcaaaggagactgccagtgataaactggaggaaggtggggatgacgtcaagtcatcatggcccttacgagtagggctacacacgtgctacaatggcatatacaaagagaagcgacctcgcgagagcaagcggacctcataaagtatgtcgtagtccggattggagtctgcaactcgactccatgaagtcggaatcgctagtaatcgtagatcagaatgctacggtgaatacgttcccgggccttgtacacaccgcccgtcacaccatgggagtgggttgcaaaagaagtaggtagcttaaccggtcaacagccgtttgagctaaccggtactaatgaaccgtgaggcttaaccttgagaggttaagcgactaagcgtacacggtggatgccctggcagtcagaggcgatgaaggacgtgctaatctgcgataagcgtcggtaaggtgatatgaaccgttataaccggcgatttccgaatggggaaacccagtgtgtttcgacacactatcattaactgaatccataggttaatgaggcgaaccgggggaactgaaacatctaagtaccccgaggaaaagaaatcaaccgagattcccccagtagcggcgagcgaacggggagcagcccagagcctgaatcagtgtgtgtgttagtggaagcgtctggaaaggcgcgcgatacagggtgacagccccgtacacaaaaatgcacatgctgtgagctcgatgagtagggcgggacacgtggtatcctgtctgaatatggggggaccatcctccaaggctaaatactcctgactgaccgatagtgaaccagtaccgtgagggaaaggcgaaaagaaccccggcgaggggagtgaaaaagaacctgaaaccgtgtacgtacaagcagtgggagcacgcttaggcgtgtgactgcgtaccttttgtataatgggtcagcgacttatattctgtagcaaggttaaccgaataggggagccgaagggaaaccgagtcttaactgggcgttaagttgcagggtatagacccgaaacccggtgatctagccatgggcaggttgaaggttgggtaacactaactggaggaccgaaccgactaatgttgaaaaattagcggatgacttgtggctgggggtgaaaggccaatcaaaccgggagatagctggttctccccgaaagctatttaggtagcgcctcgtgaattcatctccgggggtagagcactgtttcggcaagggggtcatcccgacttaccaacccgatgcaaactgcgaataccggagaatgttatcacgggagacacacggcgggtgctaacgtccgtcgtgaagagggaaacaacccagaccgccagctaaggtcccaaagtcatggttaagtgggaaacgatgtgggaaggcccagacagccaggatgttggcttagaagcagccatcatttaaagaaagcgtaatagctcactggtcgagtcggcctgcgcggaagatgtaacggggctaaaccatgcaccgaagctgcggcagcgacgcttatgcgttgttgggtaggggagcgttctgtaagcctgcgaaggtgtgctgtgaggcatgctggaggtatcagaagtgcgaatgctgacataagtaacgataaagcgggtgaaaagcccgctcgccggaagaccaagggttcctgtccaacgttaatcggggcagggtgagtcgacccctaaggcgaggccgaaaggcgtagtcgatgggaaacaggttaatattcctgtacttggtgttactgcgaaggggggacggagaaggctatgttggccgggcgacggttgtcccggtttaagcgtgtaggctggttttccaggcaaatccggaaaatcaaggctgaggcgtgatgacgaggcactacggtgctgaagcaacaaatgccctgcttccaggaaaagcctctaagcatcaggtaacatcaaatcgtaccccaaaccgacacaggtggtcaggtagagaataccaaggcgcttgagagaactcgggtgaaggaactaggcaaaatggtgccgtaacttcgggagaaggcacgctgatatgtaggtgaggtccctcgcggatggagctgaaatcagtcgaagataccagctggctgcaactgtttattaaaaacacagcactgtgcaaacacgaaagtggacgtatacggtgtgacgcctgcccggtgccggaaggttaattgatggggttagcgcaagcgaagctcttgatcgaagccccggtaaacggcggccgtaactataacggtcctaaggtagcgaaattccttgtcgggtaagttccgacctgcacgaatggcgtaatgatggccaggctgtctccacccgagactcagtgaaattgaactcgctgtgaagatgcagtgtacccgcggcaagacggaaagaccccgtgaacctttactatagcttgacactgaacattgagccttgatgtgtaggataggtgggaggctttgaagtgtggacgccagtctgcatggagccgaccttgaaataccaccctttaatgtttgatgttctaacgttgacccgtaatccgggttgcggacagtgtctggtgggtagtttgactggggcggtctcctcctaaagagtaacggaggagcacgaaggttggctaatcctggtcggacatcaggaggttagtgcaatggcataagccagcttgactgcgagcgtgacggcgcgagcaggtgcgaaagcaggtcatagtgatccggtggttctgaatggaagggccatcgctcaacggataaaaggtactccggggataacaggctgataccgcccaagagttcatatcgacggcggtgtttggcacctcgatgtcggctcatcacatcctggggctgaagtaggtcccaagggtatggctgttcgccatttaaagtggtacgcgagctgggtttagaacgtcgtgagacagttcggtccctatctgccgtgggcgctggagaactgaggggggctgctcctagtacgagaggaccggagtggacgcatcactggtgttcgggttgtcatgccaatggcactgcccggtagctaaatgcggaagagataagtgctgaaagcatctaagcacgaaacttgccccgagatgagttctccctgaccctttaagggtcctgaaggaacgttgaagacgacgacgttgataggccgggtgtgtaaacggacatggttttcgggagggcgcttaccactttgtgattcatgactggggtgaagtcgtaacaaggtaaccgtaggggaacctgcggttggatcatgtggttaccttaaagaagcgtactttgtagtgctcacacagattgtctgatagaaagtgaaaagcaaggcgtttacgcgttgggagtgaggctgaagagaataaggccgttcgctttctattaatgaaagctcaccctacacgaaaatatcacgcaacgcgtgataagcaattttcgtgtccccttcgtctagaggcccaggacaccgccctttcacggcggtaacaggggttcgaatcccctaggggacgccacttgctggtttgtgagtgaaagtcgccgaccttaatatctcaaaactcatcttcgggtgatgtttgagatatttgctctttaaaaatctggatcaagctgaaaattgaaacactgaacaacgagagttgttcgtgagtctctcaaattttcgcaacacgatgatgaatcgaaaggcggatgagagaagattttcagcctgatacagattaaatcagaacgcagaagcggtctgataaaacagaatttgcctggcggcagtagcgcggtggtcccacctgaccccatgccgaactcagaagtgaaacgccgtagcgccgatggtagtgtggggtctccccatgcgagagtagggaactgccaggcatcaaataaaacgaaaggctcagtcgaaagactgggcctttcgttttatctgttgtttgtcggtgaacgctctcctgagtaggacaaatccgccgggagcggatttgaacgttgcgaagcaacggcccggagggtggcgggcaggacgcccgccataaactgccaggcatcaaattaagcagaaggccatcctgacggatggcctttttgcgtttctacaaactcttcctgtcgtcatatctacaagccggcgcgccgggaaatgtgcgcggaacccctatttgtttatttttctaaatacattcaaatatgtatccgctcatgagacaataaccctgataaatgcttcaataatattgaaaaaggaagagtatgagtattcaacatttccgtgtcgcccttattcccttttttgcggcattttgccttcctgtttttgctcacccagaaacgctggtgaaagtaaaagatgctgaagatcagttgggtgcacgagtgggttacatcgaactggatctcaacagcggtaagatccttgagagttttcgccccgaagaacgttttccaatgatgagcacttttaaagttctgctatgtggcgcggtattatcccgtgttgacgccgggcaagagcaactcggtcgccgcatacactattctcagaatgacttggttgagtactcaccagtcacagaaaagcatcttacggatggcatgacagtaagagaattatgcagtgctgcaataaccatgagtgataacactgcggccaacttacttctgacaacgatcggaggaccgaaggagctaaccgcttttttgcacaacatgggggatcatgtaactcgccttgatcgttgggaaccggagctgaatgaagccataccaaacgacgagcgtgacaccacgatgcctgcagcaatggcaacaacgttgcgcaaactattaactggcgaactacttactctagcttcccggcaacaattaatagactggatggaggcggataaagttgcaggaccacttctgcgctcggcccttccggctagctggtttattgctgataaatctggagccggtgagcgtgggtctcgcggtatcattgcagcactggggccagatggtaagccctcccgtatcgtagttatctacacgacggggagtcaggcaactatggatgaacgaaatagacagatcgctgagataggtgcctcactgattaagcattggtaactgcagaccaagtttactcatatatactttagattgatttaaaacttcatttttaatttaaaaggatctaggtgaagatcctttttgataatctcatgaccaaaatcccttaacgtgagttttcgttccactgagcgtcagaccccgtagaaaagatcaaaggatcttcttgagatcctttttttctgcgcgtaatctgctgcttgcaaacaaaaaaaccaccgctaccagcggtggtttgtttgccggatcaagagctaccaactctttttccgaaggtaactggcttcagcagagcgcagataccaaatactgtccttctagtgtagccgtagttaggccaccacttcaagaactctgtagcaccgcctacatacctcgctctgctaatcctgttaccagtggctgctgccagtggcgataagtcgtgtcttaccgggttggactcaagacgatagttaccggataaggcgcagcggtcgggctgaacggggggttcgtgcacacagcccagcttggagcgaacgacctacaccgaactgagatacctacagcgtgagctatgagaaagcgccacgcttcccgaagggagaaaggcggacaggtatccggtaagcggcagggtcggaacaggagagcgcacgagggagcttccagggggaaacgcctggtatctttatagtcctgtcgggtttcgccacctctgacttgagcgtcgatttttgtgatgctcgtcaggggggcggagcctatggaaaaacgccagcaacgcggcctttttacggttcctggccttttgctgg

SEQ ID NO: 374 - DNA, 7393 bp, Artificial
  Synthetic
agacttagggaccctgcggccgccattaattcctaatttttgttgacactctatcattgatagagttattttaccactccctatcagtgatagagaaaagtgaaatgaatagaccggccgctgagaaaaagcgaagcggcactgctctttaacaatttatcagacaatctgtgtgggcactcgaagatacggattcttaacgtcgcaagacgaaaaatgaataccaagtctcaagagtgaacacgtaattcattacgaagtttaattctttgagcgtcaaactttttaattgaagagtttgatcatggctcagattgaacgctggcggcaggcctaacacatgcaagtcgagcggtaacaggggaagcttgcttctcgctgacgagcggcggacgggtgagtaatgtatggggatctgcccgatagagggggataactactggaaacggtggctaataccgcataatctcttaggagcaaagcaggggaccttcgggccttgcgctgtcggatgaacccatatgggattagctagtaggtaaggtaatggcttacctaggcgacgatccctagctggtctgagaggatgatcagccacactgggactgagacacggcccagactcctacgggaggcagcagtggggaatattgcacaatgggcgcaagcctgatgcagccatgccgcgtgtatgaagaaggccctagggttgtaaagtactttcagtcgggaggaaggcgttgatgttaataccatcaacgattgacgttaccgacagaagaagcaccggctaactccgtgccagcagccgcggtaatacggagggtgcaagcgttaatcggaattactgggcgtaaagcgcacgcaggcggttaattaagttagatgtgaaatccccgggcttaacctgggaatggcatctaagactggttagctagagtcttgtagaggggggtagaattccatgtgtagcggtgaaatgcgtagagatgtggaggaataccggtggcgaaggcggccccctggacaaagactgacgctcaggtgcgaaagcgtggggagcaaacaggattagataccctggtagtccacgctgtaaacgatgtcgatttggaggttgttccctagaggagtggcttccggagctaacgcgttaaatcgaccgcctggggagtacggccgcaaggttaaaactcaaatgaattgacgggggcccgcacaagcggtggagcatgtggtttaattcgatgcaacgcgaagaaccttacctactcttgacatccagagaatttagcagagatgctttagtgccttcgggaactctgagacaggtgctgcatggctgtcgtcagctcgtgttgtgaaatgttgggttaagtcccgcaacgagcgcaacccttatcctttgttgccagcgattcggtcgggaactcaaaggagactgccggtgataaaccggaggaaggtggggatgacgtcaagtcatcatggcccttacgagtagggctacacacgtgctacaatggcgtatacaaagagaagcgacctcgcgagagcaagcggaactcataaagtacgtcgtagtccggattggagtctgcaactcgactccatgaagtcggaatcgctagtaatcgtagatcagaatgctacggtgaatacgttcccgggccttgtacacaccgcccgtcacaccatgggagtgggttgcaaaagaagtaggtagcttaaccggtcaacagccgtttgagctaaccggtactaatgaaccgtgaggcttaaccttgagaggttaagcgactaagcgtacacggtggatgccctggcagtcagaggcgatgaaggacgtgctaatctgcgataagcgtcggtaaggtgatatgaaccgttataaccggcgatttccgaatggggaaacccagtgtgtttcgacacactatcattaactgaatccataggttaatgaggcgaaccgggggaactgaaacatctaagtaccccgaggaaaagaaatcaaccgagattcccccagtagcggcgagcgaacggggagcagcccagagcctgaatcagtgtgtgtgttagtggaagcgtctggaaaggcgcgcgatacagggtgacagccccgtacacaaaaatgcacatgctgtgagctcgatgagtagggcgggacacgtggtatcctgtctgaatatggggggaccatcctccaaggctaaatactcctgactgaccgatagtgaaccagtaccgtgagggaaaggcgaaaagaaccccggcgaggggagtgaaaaagaacctgaaaccgtgtacgtacaagcagtgggagcacgcttaggcgtgtgactgcgtaccttttgtataatgggtcagcgacttatattctgtagcaaggttaaccgaataggggagccgaagggaaaccgagtcttaactgggcgttaagttgcagggtatagacccgaaacccggtgatctagccatgggcaggttgaaggttgggtaacactaactggaggaccgaaccgactaatgttgaaaaattagcggatgacttgtggctgggggtgaaaggccaatcaaaccgggagatagctggttctccccgaaagctatttaggtagcgcctcgtgaattcatctccgggggtagagcactgtttcggcaagggggtcatcccgacttaccaacccgatgcaaactgcgaataccggagaatgttatcacgggagacacacggcgggtgctaacgtccgtcgtgaagagggaaacaacccagaccgccagctaaggtcccaaagtcatggttaagtgggaaacgatgtgggaaggcccagacagccaggatgttggcttagaagcagccatcatttaaagaaagcgtaatagctcactggtcgagtcggcctgcgcggaagatgtaacggggctaaaccatgcaccgaagctgcggcagcgacgcttatgcgttgttgggtaggggagcgttctgtaagcctgcgaaggtgtgctgtgaggcatgctggaggtatcagaagtgcgaatgctgacataagtaacgataaagcgggtgaaaagcccgctcgccggaagaccaagggttcctgtccaacgttaatcggggcagggtgagtcgacccctaaggcgaggccgaaaggcgtagtcgatgggaaacaggttaatattcctgtacttggtgttactgcgaaggggggacggagaaggctatgttggccgggcgacggttgtcccggtttaagcgtgtaggctggttttccaggcaaatccggaaaatcaaggctgaggcgtgatgacgaggcactacggtgctgaagcaacaaatgccctgcttccaggaaaagcctctaagcatcaggtaacatcaaatcgtaccccaaaccgacacaggtggtcaggtagagaataccaaggcgcttgagagaactcgggtgaaggaactaggcaaaatggtgccgtaacttcgggagaaggcacgctgatatgtaggtgaggtccctcgcggatggagctgaaatcagtcgaagataccagctggctgcaactgtttattaaaaacacagcactgtgcaaacacgaaagtggacgtatacggtgtgacgcctgcccggtgccggaaggttaattgatggggttagcgcaagcgaagctcttgatcgaagccccggtaaacggcggccgtaactataacggtcctaaggtagcgaaattccttgtcgggtaagttccgacctgcacgaatggcgtaatgatggccaggctgtctccacccgagactcagtgaaattgaactcgctgtgaagatgcagtgtacccgcggcaagacggaaagaccccgtgaacctttactatagcttgacactgaacattgagccttgatgtgtaggataggtgggaggctttgaagtgtggacgccagtctgcatggagccgaccttgaaataccaccctttaatgtttgatgttctaacgttgacccgtaatccgggttgcggacagtgtctggtgggtagtttgactggggcggtctcctcctaaagagtaacggaggagcacgaaggttggctaatcctggtcggacatcaggaggttagtgcaatggcataagccagcttgactgcgagcgtgacggcgcgagcaggtgcgaaagcaggtcatagtgatccggtggttctgaatggaagggccatcgctcaacggataaaaggtactccggggataacaggctgataccgcccaagagttcatatcgacggcggtgtttggcacctcgatgtcggctcatcacatcctggggctgaagtaggtcccaagggtatggctgttcgccatttaaagtggtacgcgagctgggtttagaacgtcgtgagacagttcggtccctatctgccgtgggcgctggagaactgaggggggctgctcctagtacgagaggaccggagtggacgcatcactggtgttcgggttgtcatgccaatggcactgcccggtagctaaatgcggaagagataagtgctgaaagcatctaagcacgaaacttgccccgagatgagttctccctgaccctttaagggtcctgaaggaacgttgaagacgacgacgttgataggccgggtgtgtaaacggacatggttttcgggagggcgcttaccactttgtgatccatgactggggtgaagtcgtaacaaggtaaccgtaggggaacctgcggttggatcatgtggttaccttaaagaagcgtactttgtagtgctcacacagattgtctgatagaaagtgaaaagcaaggcgtttacgcgttgggagtgaggctgaagagaataaggccgttcgctttctattaatgaaagctcaccctacacgaaaatatcacgcaacgcgtgataagcaattttcgtgtccccttcgtctagaggcccaggacaccgccctttcacggcggtaacaggggttcgaatcccctaggggacgccacttgctggtttgtgagtgaaagtcgccgaccttaatatctcaaaactcatcttcgggtgatgtttgagatatttgctctttaaaaatctggatcaagctgaaaattgaaacactgaacaacgagagttgttcgtgagtctctcaaattttcgcaacacgatgatgaatcgaaaggcggatgagagaagattttcagcctgatacagattaaatcagaacgcagaagcggtctgataaaacagaatttgcctggcggcagtagcgcggtggtcccacctgaccccatgccgaactcagaagtgaaacgccgtagcgccgatggtagtgtggggtctccccatgcgagagtagggaactgccaggcatcaaataaaacgaaaggctcagtcgaaagactgggcctttcgttttatctgttgtttgtcggtgaacgctctcctgagtaggacaaatccgccgggagcggatttgaacgttgcgaagcaacggcccggagggtggcgggcaggacgcccgccataaactgccaggcatcaaattaagcagaaggccatcctgacggatggcctttttgcgtttctacaaactcttcctgtcgtcatatctacaagccggcgcgccgggaaatgtgcgcggaacccctatttgtttatttttctaaatacattcaaatatgtatccgctcatgagacaataaccctgataaatgcttcaataatattgaaaaaggaagagtatgagtattcaacatttccgtgtcgcccttattcccttttttgcggcattttgccttcctgtttttgctcacccagaaacgctggtgaaagtaaaagatgctgaagatcagttgggtgcacgagtgggttacatcgaactggatctcaacagcggtaagatccttgagagttttcgccccgaagaacgttttccaatgatgagcacttttaaagttctgctatgtggcgcggtattatcccgtgttgacgccgggcaagagcaactcggtcgccgcatacactattctcagaatgacttggttgagtactcaccagtcacagaaaagcatcttacggatggcatgacagtaagagaattatgcagtgctgcaataaccatgagtgataacactgcggccaacttacttctgacaacgatcggaggaccgaaggagctaaccgcttttttgcacaacatgggggatcatgtaactcgccttgatcgttgggaaccggagctgaatgaagccataccaaacgacgagcgtgacaccacgatgcctgcagcaatggcaacaacgttgcgcaaactattaactggcgaactacttactctagcttcccggcaacaattaatagactggatggaggcggataaagttgcaggaccacttctgcgctcggcccttccggctagctggtttattgctgataaatctggagccggtgagcgtgggtctcgcggtatcattgcagcactggggccagatggtaagccctcccgtatcgtagttatctacacgacggggagtcaggcaactatggatgaacgaaatagacagatcgctgagataggtgcctcactgattaagcattggtaactgcagaccaagtttactcatatatactttagattgatttaaaacttcatttttaatttaaaaggatctaggtgaagatcctttttgataatctcatgaccaaaatcccttaacgtgagttttcgttccactgagcgtcagaccccgtagaaaagatcaaaggatcttcttgagatcctttttttctgcgcgtaatctgctgcttgcaaacaaaaaaaccaccgctaccagcggtggtttgtttgccggatcaagagctaccaactctttttccgaaggtaactggcttcagcagagcgcagataccaaatactgtccttctagtgtagccgtagttaggccaccacttcaagaactctgtagcaccgcctacatacctcgctctgctaatcctgttaccagtggctgctgccagtggcgataagtcgtgtcttaccgggttggactcaagacgatagttaccggataaggcgcagcggtcgggctgaacggggggttcgtgcacacagcccagcttggagcgaacgacctacaccgaactgagatacctacagcgtgagctatgagaaagcgccacgcttcccgaagggagaaaggcggacaggtatccggtaagcggcagggtcggaacaggagagcgcacgagggagcttccagggggaaacgcctggtatctttatagtcctgtcgggtttcgccacctctgacttgagcgtcgatttttgtgatgctcgtcaggggggcggagcctatggaaaaacgccagcaacgcggcctttttacggttcctggccttttgctgg

SEQ ID NO: 375 - DNA, 7396 bp, Artificial
  Synthetic
agacttagggaccctgcggccgccattaattcctaatttttgttgacactctatcattgatagagttattttaccactccctatcagtgatagagaaaagtgaaatgaatagaccggccgctgagaaaaagcgaagcggcactgctctttaacaatttatcagacaatctgtgtgggcactcgaagatacggattcttaacgtcgcaagacgaaaaatgaataccaagtctcaagagtgaacacgtaattcattacgaagtttaattctttgagcgtcaaactttttaattgaagagtttgatcatggctcagattgaacgctggcggcaggcctaacacatgcaagtcgagcggcagcacagaggaacttgttccttgggtggcgagcggcggacgggtgagtaatgcctgggaaattgcccggtagagggggataaccattggaaacgatggctaataccgcataacctcgcaagagcaaagcaggggaccttcgggccttgcgctaccggatatgcccaggtgggattagctagttggtgaggtaagggctcaccaaggcgacgatccctagctggtctgagaggatgatcagccacactggaactgagacacggtccagactcctacgggaggcagcagtggggaatattgcacaatgggcgcaagcctgatgcagccatgccgcgtgtatgaagaaggccttcgggttgtaaagtactttcagtagggaggaaggtggttaagttaataccttaatcatttgacgttacctacagaagaagcaccggctaactccgtgccagcagccgcggtaatacggagggtgcaagcgttaatcggaattactgggcgtaaagcgcatgcaggtggtttgttaagtcagatgtgaaagccctgggctcaacctaggaatcgcatttgaaactgacaagctagagtactgtagaggggggtagaatttcaggtgtagcggtgaaatgcgtagagatctgaaggaataccggtggcgaaggcggccccctggacagatactgacactcagatgcgaaagcgtggggagcaaacaggattagataccctggtagtccacgccgtaaacgatgtctacttggaggttgtgacctagagtcgtggctttcggagctaacgcgttaagtagaccgcctggggagtacggtcgcaagattaaaactcaaatgaattgacgggggcccgcacaagcggtggagcatgtggtttaattcgatgcaacgcgaagaaccttacctactcttgacatccagagaatctagcggagacgctggagtgccttcgggagctctgagacaggtgctgcatggctgtcgtcagctcgtgttgtgaaatgttgggttaagtcccgcaacgagcgcaacccttatccttgtttgccagcacgtaatggtgggaactccagggagactgccggtgataaaccggaggaaggtggggacgacgtcaagtcatcatggcccttacgagtagggctacacacgtgctacaatggcgtatacagagggcagcgataccgcgaggtggagcgaatctcacaaagtacgtcgtagtccggattggagtctgcaactcgactccatgaagtcggaatcgctagtaatcgcaaatcagaatgttgcggtgaatacgttcccgggccttgtacacaccgcccgtcacaccatgggagtgggctgcaaaagaagcaggtagtttaaccggtcaacagccgtttgagctaaccggtactaatgaaccgtgaggcttaaccttgagaggttaagcgactaagcgtacacggtggatgccctggcagtcagaggcgatgaaggacgtgctaatctgcgataagcgtcggtaaggtgatatgaaccgttataaccggcgatttccgaatggggaaacccagtgtgtttcgacacactatcattaactgaatccataggttaatgaggcgaaccgggggaactgaaacatctaagtaccccgaggaaaagaaatcaaccgagattcccccagtagcggcgagcgaacggggagcagcccagagcctgaatcagtgtgtgtgttagtggaagcgtctggaaaggcgcgcgatacagggtgacagccccgtacacaaaaatgcacatgctgtgagctcgatgagtagggcgggacacgtggtatcctgtctgaatatggggggaccatcctccaaggctaaatactcctgactgaccgatagtgaaccagtaccgtgagggaaaggcgaaaagaaccccggcgaggggagtgaaaaagaacctgaaaccgtgtacgtacaagcagtgggagcacgcttaggcgtgtgactgcgtaccttttgtataatgggtcagcgacttatattctgtagcaaggttaaccgaataggggagccgaagggaaaccgagtcttaactgggcgttaagttgcagggtatagacccgaaacccggtgatctagccatgggcaggttgaaggttgggtaacactaactggaggaccgaaccgactaatgttgaaaaattagcggatgacttgtggctgggggtgaaaggccaatcaaaccgggagatagctggttctccccgaaagctatttaggtagcgcctcgtgaattcatctccgggggtagagcactgtttcggcaagggggtcatcccgacttaccaacccgatgcaaactgcgaataccggagaatgttatcacgggagacacacggcgggtgctaacgtccgtcgtgaagagggaaacaacccagaccgccagctaaggtcccaaagtcatggttaagtgggaaacgatgtgggaaggcccagacagccaggatgttggcttagaagcagccatcatttaaagaaagcgtaatagctcactggtcgagtcggcctgcgcggaagatgtaacggggctaaaccatgcaccgaagctgcggcagcgacgcttatgcgttgttgggtaggggagcgttctgtaagcctgcgaaggtgtgctgtgaggcatgctggaggtatcagaagtgcgaatgctgacataagtaacgataaagcgggtgaaaagcccgctcgccggaagaccaagggttcctgtccaacgttaatcggggcagggtgagtcgacccctaaggcgaggccgaaaggcgtagtcgatgggaaacaggttaatattcctgtacttggtgttactgcgaaggggggacggagaaggctatgttggccgggcgacggttgtcccggtttaagcgtgtaggctggttttccaggcaaatccggaaaatcaaggctgaggcgtgatgacgaggcactacggtgctgaagcaacaaatgccctgcttccaggaaaagcctctaagcatcaggtaacatcaaatcgtaccccaaaccgacacaggtggtcaggtagagaataccaaggcgcttgagagaactcgggtgaaggaactaggcaaaatggtgccgtaacttcgggagaaggcacgctgatatgtaggtgaggtccctcgcggatggagctgaaatcagtcgaagataccagctggctgcaactgtttattaaaaacacagcactgtgcaaacacgaaagtggacgtatacggtgtgacgcctgcccggtgccggaaggttaattgatggggttagcgcaagcgaagctcttgatcgaagccccggtaaacggcggccgtaactataacggtcctaaggtagcgaaattccttgtcgggtaagttccgacctgcacgaatggcgtaatgatggccaggctgtctccacccgagactcagtgaaattgaactcgctgtgaagatgcagtgtacccgcggcaagacggaaagaccccgtgaacctttactatagcttgacactgaacattgagccttgatgtgtaggataggtgggaggctttgaagtgtggacgccagtctgcatggagccgaccttgaaataccaccctttaatgtttgatgttctaacgttgacccgtaatccgggttgcggacagtgtctggtgggtagtttgactggggcggtctcctcctaaagagtaacggaggagcacgaaggttggctaatcctggtcggacatcaggaggttagtgcaatggcataagccagcttgactgcgagcgtgacggcgcgagcaggtgcgaaagcaggtcatagtgatccggtggttctgaatggaagggccatcgctcaacggataaaaggtactccggggataacaggctgataccgcccaagagttcatatcgacggcggtgtttggcacctcgatgtcggctcatcacatcctggggctgaagtaggtcccaagggtatggctgttcgccatttaaagtggtacgcgagctgggtttagaacgtcgtgagacagttcggtccctatctgccgtgggcgctggagaactgaggggggctgctcctagtacgagaggaccggagtggacgcatcactggtgttcgggttgtcatgccaatggcactgcccggtagctaaatgcggaagagataagtgctgaaagcatctaagcacgaaacttgccccgagatgagttctccctgaccctttaagggtcctgaaggaacgttgaagacgacgacgttgataggccgggtgtgtaaacggacatggttttcgggaggacgcttgccactttgtggttcatgactggggtgaagtcgtaacaaggtagcgctaggggaacctggcgctggatcatgtggttaccttaaagaagcgtactttgtagtgctcacacagattgtctgatagaaagtgaaaagcaaggcgtttacgcgttgggagtgaggctgaagagaataaggccgttcgctttctattaatgaaagctcaccctacacgaaaatatcacgcaacgcgtgataagcaattttcgtgtccccttcgtctagaggcccaggacaccgccctttcacggcggtaacaggggttcgaatcccctaggggacgccacttgctggtttgtgagtgaaagtcgccgaccttaatatctcaaaactcatcttcgggtgatgtttgagatatttgctctttaaaaatctggatcaagctgaaaattgaaacactgaacaacgagagttgttcgtgagtctctcaaattttcgcaacacgatgatgaatcgaaaggcggatgagagaagattttcagcctgatacagattaaatcagaacgcagaagcggtctgataaaacagaatttgcctggcggcagtagcgcggtggtcccacctgaccccatgccgaactcagaagtgaaacgccgtagcgccgatggtagtgtggggtctccccatgcgagagtagggaactgccaggcatcaaataaaacgaaaggctcagtcgaaagactgggcctttcgttttatctgttgtttgtcggtgaacgctctcctgagtaggacaaatccgccgggagcggatttgaacgttgcgaagcaacggcccggagggtggcgggcaggacgcccgccataaactgccaggcatcaaattaagcagaaggccatcctgacggatggcctttttgcgtttctacaaactcttcctgtcgtcatatctacaagccggcgcgccgggaaatgtgcgcggaacccctatttgtttatttttctaaatacattcaaatatgtatccgctcatgagacaataaccctgataaatgcttcaataatattgaaaaaggaagagtatgagtattcaacatttccgtgtcgcccttattcccttttttgcggcattttgccttcctgtttttgctcacccagaaacgctggtgaaagtaaaagatgctgaagatcagttgggtgcacgagtgggttacatcgaactggatctcaacagcggtaagatccttgagagttttcgccccgaagaacgttttccaatgatgagcacttttaaagttctgctatgtggcgcggtattatcccgtgttgacgccgggcaagagcaactcggtcgccgcatacactattctcagaatgacttggttgagtactcaccagtcacagaaaagcatcttacggatggcatgacagtaagagaattatgcagtgctgcaataaccatgagtgataacactgcggccaacttacttctgacaacgatcggaggaccgaaggagctaaccgcttttttgcacaacatgggggatcatgtaactcgccttgatcgttgggaaccggagctgaatgaagccataccaaacgacgagcgtgacaccacgatgcctgcagcaatggcaacaacgttgcgcaaactattaactggcgaactacttactctagcttcccggcaacaattaatagactggatggaggcggataaagttgcaggaccacttctgcgctcggcccttccggctagctggtttattgctgataaatctggagccggtgagcgtgggtctcgcggtatcattgcagcactggggccagatggtaagccctcccgtatcgtagttatctacacgacggggagtcaggcaactatggatgaacgaaatagacagatcgctgagataggtgcctcactgattaagcattggtaactgcagaccaagtttactcatatatactttagattgatttaaaacttcatttttaatttaaaaggatctaggtgaagatcctttttgataatctcatgaccaaaatcccttaacgtgagttttcgttccactgagcgtcagaccccgtagaaaagatcaaaggatcttcttgagatcctttttttctgcgcgtaatctgctgcttgcaaacaaaaaaaccaccgctaccagcggtggtttgtttgccggatcaagagctaccaactctttttccgaaggtaactggcttcagcagagcgcagataccaaatactgtccttctagtgtagccgtagttaggccaccacttcaagaactctgtagcaccgcctacatacctcgctctgctaatcctgttaccagtggctgctgccagtggcgataagtcgtgtcttaccgggttggactcaagacgatagttaccggataaggcgcagcggtcgggctgaacggggggttcgtgcacacagcccagcttggagcgaacgacctacaccgaactgagatacctacagcgtgagctatgagaaagcgccacgcttcccgaagggagaaaggcggacaggtatccggtaagcggcagggtcggaacaggagagcgcacgagggagcttccagggggaaacgcctggtatctttatagtcctgtcgggtttcgccacctctgacttgagcgtcgatttttgtgatgctcgtcaggggggcggagcctatggaaaaacgccagcaacgcggcctttttacggttcctggccttttgctgg

SEQ ID NO: 376 - DNA, 7386 bp, Artificial
  Synthetic
agacttagggaccctgcggccgccattaattcctaatttttgttgacactctatcattgatagagttattttaccactccctatcagtgatagagaaaagtgaaatgaatagaccggccgctgagaaaaagcgaagcggcactgctctttaacaatttatcagacaatctgtgtgggcactcgaagatacggattcttaacgtcgcaagacgaaaaatgaataccaagtctcaagagtgaacacgtaattcattacgaagtttaattctttgagcgtcaaactttttaattgaagagtttgatcatggctcagattgaacgctggcggcaggcctaacacatgcaagtcgaacggtaacatttctagcttgctagaagatgacgagtggcggacgggtgagtaatgcttgggaacttgcctttgcgagggggataacagttggaaacgactgctaataccgcataatgtcttcggaccaaacggggcttaggctccggcgcaaagagaggcccaagtgagattagctagttggtaaggtaacggcttaccaaggcgacgatctctagctgttctgagaggaagatcagccacactgggactgagacacggcccagactcctacgggaggcagcagtggggaatattgcacaatgggggaaaccctgatgcagccatgccgcgtgtgtgaagaaggccttcgggttgtaaagcactttcagttgtgaggaaaagttagtagttaatacctgctagccgtgacgttaacaacagaagaagcaccggctaactccgtgccagcagccgcggtaatacggagggtgcgagcgttaatcggaattactgggcgtaaagcgcacgcaggcggtttgttaagctagatgtgaaagccccgggctcaacctgggatggtcatttagaactggcagactagagtcttggagaggggagtggaattccaggtgtagcggtgaaatgcgtagatatctggaggaacatcagtggcgaaggcgactccctggccaaagactgacgctcatgtgcgaaagtgtgggtagcgaacaggattagataccctggtagtccacaccgtaaacgctgtctactagctgtgtgtgtctttaagacgtgcgtagcgaagctaacgcgctaagtagaccgcctggggagtacggccgcaaggttaaaactcaaatgaattgacgggggcccgcacaagcggtggagcatgtggtttaattcgatgcaacgcgaagaaccttacctacacttgacatgctgagaagttactagagatagtttcgtgccttcgggaactcagacacaggtgctgcatggctgtcgtcagctcgtgtcgtgagatgttgggttaagtcccgcaacgagcgcaacccttgtccttagttgccagccttaagttgggcactctaaggagactgccggtgacaaaccggaggaaggtggggacgacgtcaagtcatcatggcccttacgtgtagggctacacacgtgctacaatggcatttacagagggaagcgagacagtgatgtggagcggaccccttaaagaatgtcgtagtccggattggagtctgcaactcgactccatgaagtcggaatcgctagtaatcgcaggtcagaatactgcggtgaatacgttcccgggccttgtacacaccgcccgtcacaccatgggagtgggatgcaaaagaagtagttagtctaaccggtcaacagccgtttgagctaaccggtactaatgaaccgtgaggcttaaccttgagaggttaagcgactaagcgtacacggtggatgccctggcagtcagaggcgatgaaggacgtgctaatctgcgataagcgtcggtaaggtgatatgaaccgttataaccggcgatttccgaatggggaaacccagtgtgtttcgacacactatcattaactgaatccataggttaatgaggcgaaccgggggaactgaaacatctaagtaccccgaggaaaagaaatcaaccgagattcccccagtagcggcgagcgaacggggagcagcccagagcctgaatcagtgtgtgtgttagtggaagcgtctggaaaggcgcgcgatacagggtgacagccccgtacacaaaaatgcacatgctgtgagctcgatgagtagggcgggacacgtggtatcctgtctgaatatggggggaccatcctccaaggctaaatactcctgactgaccgatagtgaaccagtaccgtgagggaaaggcgaaaagaaccccggcgaggggagtgaaaaagaacctgaaaccgtgtacgtacaagcagtgggagcacgcttaggcgtgtgactgcgtaccttttgtataatgggtcagcgacttatattctgtagcaaggttaaccgaataggggagccgaagggaaaccgagtcttaactgggcgttaagttgcagggtatagacccgaaacccggtgatctagccatgggcaggttgaaggttgggtaacactaactggaggaccgaaccgactaatgttgaaaaattagcggatgacttgtggctgggggtgaaaggccaatcaaaccgggagatagctggttctccccgaaagctatttaggtagcgcctcgtgaattcatctccgggggtagagcactgtttcggcaagggggtcatcccgacttaccaacccgatgcaaactgcgaataccggagaatgttatcacgggagacacacggcgggtgctaacgtccgtcgtgaagagggaaacaacccagaccgccagctaaggtcccaaagtcatggttaagtgggaaacgatgtgggaaggcccagacagccaggatgttggcttagaagcagccatcatttaaagaaagcgtaatagctcactggtcgagtcggcctgcgcggaagatgtaacggggctaaaccatgcaccgaagctgcggcagcgacgcttatgcgttgttgggtaggggagcgttctgtaagcctgcgaaggtgtgctgtgaggcatgctggaggtatcagaagtgcgaatgctgacataagtaacgataaagcgggtgaaaagcccgctcgccggaagaccaagggttcctgtccaacgttaatcggggcagggtgagtcgacccctaaggcgaggccgaaaggcgtagtcgatgggaaacaggttaatattcctgtacttggtgttactgcgaaggggggacggagaaggctatgttggccgggcgacggttgtcccggtttaagcgtgtaggctggttttccaggcaaatccggaaaatcaaggctgaggcgtgatgacgaggcactacggtgctgaagcaacaaatgccctgcttccaggaaaagcctctaagcatcaggtaacatcaaatcgtaccccaaaccgacacaggtggtcaggtagagaataccaaggcgcttgagagaactcgggtgaaggaactaggcaaaatggtgccgtaacttcgggagaaggcacgctgatatgtaggtgaggtccctcgcggatggagctgaaatcagtcgaagataccagctggctgcaactgtttattaaaaacacagcactgtgcaaacacgaaagtggacgtatacggtgtgacgcctgcccggtgccggaaggttaattgatggggttagcgcaagcgaagctcttgatcgaagccccggtaaacggcggccgtaactataacggtcctaaggtagcgaaattccttgtcgggtaagttccgacctgcacgaatggcgtaatgatggccaggctgtctccacccgagactcagtgaaattgaactcgctgtgaagatgcagtgtacccgcggcaagacggaaagaccccgtgaacctttactatagcttgacactgaacattgagccttgatgtgtaggataggtgggaggctttgaagtgtggacgccagtctgcatggagccgaccttgaaataccaccctttaatgtttgatgttctaacgttgacccgtaatccgggttgcggacagtgtctggtgggtagtttgactggggcggtctcctcctaaagagtaacggaggagcacgaaggttggctaatcctggtcggacatcaggaggttagtgcaatggcataagccagcttgactgcgagcgtgacggcgcgagcaggtgcgaaagcaggtcatagtgatccggtggttctgaatggaagggccatcgctcaacggataaaaggtactccggggataacaggctgataccgcccaagagttcatatcgacggcggtgtttggcacctcgatgtcggctcatcacatcctggggctgaagtaggtcccaagggtatggctgttcgccatttaaagtggtacgcgagctgggtttagaacgtcgtgagacagttcggtccctatctgccgtgggcgctggagaactgaggggggctgctcctagtacgagaggaccggagtggacgcatcactggtgttcgggttgtcatgccaatggcactgcccggtagctaaatgcggaagagataagtgctgaaagcatctaagcacgaaacttgccccgagatgagttctccctgaccctttaagggtcctgaaggaacgttgaagacgacgacgttgataggccgggtgtgtaaacggacatggttttcgggaggacgattaccactttgtgtttcatgactggggtgaagtcgtaacaaggtaaccctaggggaacctggggttggatcatgtggttaccttaaagaagcgtactttgtagtgctcacacagattgtctgatagaaagtgaaaagcaaggcgtttacgcgttgggagtgaggctgaagagaataaggccgttcgctttctattaatgaaagctcaccctacacgaaaatatcacgcaacgcgtgataagcaattttcgtgtccccttcgtctagaggcccaggacaccgccctttcacggcggtaacaggggttcgaatcccctaggggacgccacttgctggtttgtgagtgaaagtcgccgaccttaatatctcaaaactcatcttcgggtgatgtttgagatatttgctctttaaaaatctggatcaagctgaaaattgaaacactgaacaacgagagttgttcgtgagtctctcaaattttcgcaacacgatgatgaatcgaaaggcggatgagagaagattttcagcctgatacagattaaatcagaacgcagaagcggtctgataaaacagaatttgcctggcggcagtagcgcggtggtcccacctgaccccatgccgaactcagaagtgaaacgccgtagcgccgatggtagtgtggggtctccccatgcgagagtagggaactgccaggcatcaaataaaacgaaaggctcagtcgaaagactgggcctttcgttttatctgttgtttgtcggtgaacgctctcctgagtaggacaaatccgccgggagcggatttgaacgttgcgaagcaacggcccggagggtggcgggcaggacgcccgccataaactgccaggcatcaaattaagcagaaggccatcctgacggatggcctttttgcgtttctacaaactcttcctgtcgtcatatctacaagccggcgcgccgggaaatgtgcgcggaacccctatttgtttatttttctaaatacattcaaatatgtatccgctcatgagacaataaccctgataaatgcttcaataatattgaaaaaggaagagtatgagtattcaacatttccgtgtcgcccttattcccttttttgcggcattttgccttcctgtttttgctcacccagaaacgctggtgaaagtaaaagatgctgaagatcagttgggtgcacgagtgggttacatcgaactggatctcaacagcggtaagatccttgagagttttcgccccgaagaacgttttccaatgatgagcacttttaaagttctgctatgtggcgcggtattatcccgtgttgacgccgggcaagagcaactcggtcgccgcatacactattctcagaatgacttggttgagtactcaccagtcacagaaaagcatcttacggatggcatgacagtaagagaattatgcagtgctgcaataaccatgagtgataacactgcggccaacttacttctgacaacgatcggaggaccgaaggagctaaccgcttttttgcacaacatgggggatcatgtaactcgccttgatcgttgggaaccggagctgaatgaagccataccaaacgacgagcgtgacaccacgatgcctgcagcaatggcaacaacgttgcgcaaactattaactggcgaactacttactctagcttcccggcaacaattaatagactggatggaggcggataaagttgcaggaccacttctgcgctcggcccttccggctagctggtttattgctgataaatctggagccggtgagcgtgggtctcgcggtatcattgcagcactggggccagatggtaagccctcccgtatcgtagttatctacacgacggggagtcaggcaactatggatgaacgaaatagacagatcgctgagataggtgcctcactgattaagcattggtaactgcagaccaagtttactcatatatactttagattgatttaaaacttcatttttaatttaaaaggatctaggtgaagatcctttttgataatctcatgaccaaaatcccttaacgtgagttttcgttccactgagcgtcagaccccgtagaaaagatcaaaggatcttcttgagatcctttttttctgcgcgtaatctgctgcttgcaaacaaaaaaaccaccgctaccagcggtggtttgtttgccggatcaagagctaccaactctttttccgaaggtaactggcttcagcagagcgcagataccaaatactgtccttctagtgtagccgtagttaggccaccacttcaagaactctgtagcaccgcctacatacctcgctctgctaatcctgttaccagtggctgctgccagtggcgataagtcgtgtcttaccgggttggactcaagacgatagttaccggataaggcgcagcggtcgggctgaacggggggttcgtgcacacagcccagcttggagcgaacgacctacaccgaactgagatacctacagcgtgagctatgagaaagcgccacgcttcccgaagggagaaaggcggacaggtatccggtaagcggcagggtcggaacaggagagcgcacgagggagcttccagggggaaacgcctggtatctttatagtcctgtcgggtttcgccacctctgacttgagcgtcgatttttgtgatgctcgtcaggggggcggagcctatggaaaaacgccagcaacgcggcctttttacggttcctggccttttgctgg

SEQ ID NO: 377 - DNA, 7388 bp, Artificial
  Synthetic
agacttagggaccctgcggccgccattaattcctaatttttgttgacactctatcattgatagagttattttaccactccctatcagtgatagagaaaagtgaaatgaatagaccggccgctgagaaaaagcgaagcggcactgctctttaacaatttatcagacaatctgtgtgggcactcgaagatacggattcttaacgtcgcaagacgaaaaatgaataccaagtctcaagagtgaacacgtaattcattacgaagtttaattctttgagcgtcaaacttttaaactgaagagtttgatcatggctcagattgaacgctggcggcaggcctaacacatgcaagtcgagcggtaacaggagaagcttgcttcttgctgacgagcggcggacgggtgagtaatacttgggtatctgcccgatagtgggggacaacacggggaaactcgtgctaataccgcatacgtcctacgggagaaagcaggcttaggcttgcgctatcggatgagcccaagtcggattagctagttggtgaggtaaaggctcaccaaggcgacgatccgtaactggtctgagaggatgatcagtcacaccgggactgagacacggcccggactcctacgggaggcagcagtggggaatattggacaatgggggcaaccctgatccagccatgccgcgtgtgtgaagaaggccttagggttgtaaagcactttcagtgaggaggaaaagttagtggttaatacccactagccgtgacgttactcacagaagaagcaccggcaaactccgtgccagcagccgcggtaatacggagggtgcgagcgttaatcggaattactgggcgtaaagcgcgcgtaggcggtttgttaagccggttgtgaaagccctaggctcaacctaggaactgcacccggaactggcaagctagagtacagtagaggaaggtggaattccacgtgtagcggtgaaatgcgtagatatgtggaggaacatcagtggcgaaggcggccttctggactgatactgacgctgaggtgcgaaagcgtggggagcaaacaggattagataccctggtagtccacgccgtaaacgatgtcaactagttgttggaacccttgaggttttagtaacgcagctaacgcattaagttgaccgcctggggagtacggccgcaaggttaaaactcaaatgaattgacgggggcccgcacaagcggtggagcatgtggtttaattcgatgcaacgcgaagaaccttacctactcttgacatccagagaatttgctagagatagcttagtgccttcgggaactctgagacaggtgctgcatggctgtcgtcagctcgtgttgtgaaatgttgggttaagtcccgtaacgagcgcaacccctatccttatttgccagcgagttaagtcgggaactctaaggagactgccggtgacaaaccggaggaaggtggggatgacgtcaagtcatcatggcccttacgagtagggctacacacgtgctacaatggttggtacagcaggttgctaacccgcgagggggcgctaatccgtcaaaaccgatcgtagtccggatcgcagtctgcaactcgactgcgtgaagtcggaatcgctagtaatcgcggatcagaatgccgcggtgaatacgttcccgggccttgtacacaccgcccgtcacaccatgggagttgattgcaccagaagtagctagcttaaccggtcaacagccgtttgagctaaccggtactaatgaaccgtgaggcttaaccttgagaggttaagcgactaagcgtacacggtggatgccctggcagtcagaggcgatgaaggacgtgctaatctgcgataagcgtcggtaaggtgatatgaaccgttataaccggcgatttccgaatggggaaacccagtgtgtttcgacacactatcattaactgaatccataggttaatgaggcgaaccgggggaactgaaacatctaagtaccccgaggaaaagaaatcaaccgagattcccccagtagcggcgagcgaacggggagcagcccagagcctgaatcagtgtgtgtgttagtggaagcgtctggaaaggcgcgcgatacagggtgacagccccgtacacaaaaatgcacatgctgtgagctcgatgagtagggcgggacacgtggtatcctgtctgaatatggggggaccatcctccaaggctaaatactcctgactgaccgatagtgaaccagtaccgtgagggaaaggcgaaaagaaccccggcgaggggagtgaaaaagaacctgaaaccgtgtacgtacaagcagtgggagcacgcttaggcgtgtgactgcgtaccttttgtataatgggtcagcgacttatattctgtagcaaggttaaccgaataggggagccgaagggaaaccgagtcttaactgggcgttaagttgcagggtatagacccgaaacccggtgatctagccatgggcaggttgaaggttgggtaacactaactggaggaccgaaccgactaatgttgaaaaattagcggatgacttgtggctgggggtgaaaggccaatcaaaccgggagatagctggttctccccgaaagctatttaggtagcgcctcgtgaattcatctccgggggtagagcactgtttcggcaagggggtcatcccgacttaccaacccgatgcaaactgcgaataccggagaatgttatcacgggagacacacggcgggtgctaacgtccgtcgtgaagagggaaacaacccagaccgccagctaaggtcccaaagtcatggttaagtgggaaacgatgtgggaaggcccagacagccaggatgttggcttagaagcagccatcatttaaagaaagcgtaatagctcactggtcgagtcggcctgcgcggaagatgtaacggggctaaaccatgcaccgaagctgcggcagcgacgcttatgcgttgttgggtaggggagcgttctgtaagcctgcgaaggtgtgctgtgaggcatgctggaggtatcagaagtgcgaatgctgacataagtaacgataaagcgggtgaaaagcccgctcgccggaagaccaagggttcctgtccaacgttaatcggggcagggtgagtcgacccctaaggcgaggccgaaaggcgtagtcgatgggaaacaggttaatattcctgtacttggtgttactgcgaaggggggacggagaaggctatgttggccgggcgacggttgtcccggtttaagcgtgtaggctggttttccaggcaaatccggaaaatcaaggctgaggcgtgatgacgaggcactacggtgctgaagcaacaaatgccctgcttccaggaaaagcctctaagcatcaggtaacatcaaatcgtaccccaaaccgacacaggtggtcaggtagagaataccaaggcgcttgagagaactcgggtgaaggaactaggcaaaatggtgccgtaacttcgggagaaggcacgctgatatgtaggtgaggtccctcgcggatggagctgaaatcagtcgaagataccagctggctgcaactgtttattaaaaacacagcactgtgcaaacacgaaagtggacgtatacggtgtgacgcctgcccggtgccggaaggttaattgatggggttagcgcaagcgaagctcttgatcgaagccccggtaaacggcggccgtaactataacggtcctaaggtagcgaaattccttgtcgggtaagttccgacctgcacgaatggcgtaatgatggccaggctgtctccacccgagactcagtgaaattgaactcgctgtgaagatgcagtgtacccgcggcaagacggaaagaccccgtgaacctttactatagcttgacactgaacattgagccttgatgtgtaggataggtgggaggctttgaagtgtggacgccagtctgcatggagccgaccttgaaataccaccctttaatgtttgatgttctaacgttgacccgtaatccgggttgcggacagtgtctggtgggtagtttgactggggcggtctcctcctaaagagtaacggaggagcacgaaggttggctaatcctggtcggacatcaggaggttagtgcaatggcataagccagcttgactgcgagcgtgacggcgcgagcaggtgcgaaagcaggtcatagtgatccggtggttctgaatggaagggccatcgctcaacggataaaaggtactccggggataacaggctgataccgcccaagagttcatatcgacggcggtgtttggcacctcgatgtcggctcatcacatcctggggctgaagtaggtcccaagggtatggctgttcgccatttaaagtggtacgcgagctgggtttagaacgtcgtgagacagttcggtccctatctgccgtgggcgctggagaactgaggggggctgctcctagtacgagaggaccggagtggacgcatcactggtgttcgggttgtcatgccaatggcactgcccggtagctaaatgcggaagagataagtgctgaaagcatctaagcacgaaacttgccccgagatgagttctccctgaccctttaagggtcctgaaggaacgttgaagacgacgacgttgataggccgggtgtgtaaacggacatggttttcgggagggcggttaccacggtgtggttaatgactggggtgaagtcgtaacaaggtagccgtaggggaacctgcggctggatcatgtggttaccttaaagaagcgtactttgtagtgctcacacagattgtctgatagaaagtgaaaagcaaggcgtttacgcgttgggagtgaggctgaagagaataaggccgttcgctttctattaatgaaagctcaccctacacgaaaatatcacgcaacgcgtgataagcaattttcgtgtccccttcgtctagaggcccaggacaccgccctttcacggcggtaacaggggttcgaatcccctaggggacgccacttgctggtttgtgagtgaaagtcgccgaccttaatatctcaaaactcatcttcgggtgatgtttgagatatttgctctttaaaaatctggatcaagctgaaaattgaaacactgaacaacgagagttgttcgtgagtctctcaaattttcgcaacacgatgatgaatcgaaaggcggatgagagaagattttcagcctgatacagattaaatcagaacgcagaagcggtctgataaaacagaatttgcctggcggcagtagcgcggtggtcccacctgaccccatgccgaactcagaagtgaaacgccgtagcgccgatggtagtgtggggtctccccatgcgagagtagggaactgccaggcatcaaataaaacgaaaggctcagtcgaaagactgggcctttcgttttatctgttgtttgtcggtgaacgctctcctgagtaggacaaatccgccgggagcggatttgaacgttgcgaagcaacggcccggagggtggcgggcaggacgcccgccataaactgccaggcatcaaattaagcagaaggccatcctgacggatggcctttttgcgtttctacaaactcttcctgtcgtcatatctacaagccggcgcgccgggaaatgtgcgcggaacccctatttgtttatttttctaaatacattcaaatatgtatccgctcatgagacaataaccctgataaatgcttcaataatattgaaaaaggaagagtatgagtattcaacatttccgtgtcgcccttattcccttttttgcggcattttgccttcctgtttttgctcacccagaaacgctggtgaaagtaaaagatgctgaagatcagttgggtgcacgagtgggttacatcgaactggatctcaacagcggtaagatccttgagagttttcgccccgaagaacgttttccaatgatgagcacttttaaagttctgctatgtggcgcggtattatcccgtgttgacgccgggcaagagcaactcggtcgccgcatacactattctcagaatgacttggttgagtactcaccagtcacagaaaagcatcttacggatggcatgacagtaagagaattatgcagtgctgcaataaccatgagtgataacactgcggccaacttacttctgacaacgatcggaggaccgaaggagctaaccgcttttttgcacaacatgggggatcatgtaactcgccttgatcgttgggaaccggagctgaatgaagccataccaaacgacgagcgtgacaccacgatgcctgcagcaatggcaacaacgttgcgcaaactattaactggcgaactacttactctagcttcccggcaacaattaatagactggatggaggcggataaagttgcaggaccacttctgcgctcggcccttccggctagctggtttattgctgataaatctggagccggtgagcgtgggtctcgcggtatcattgcagcactggggccagatggtaagccctcccgtatcgtagttatctacacgacggggagtcaggcaactatggatgaacgaaatagacagatcgctgagataggtgcctcactgattaagcattggtaactgcagaccaagtttactcatatatactttagattgatttaaaacttcatttttaatttaaaaggatctaggtgaagatcctttttgataatctcatgaccaaaatcccttaacgtgagttttcgttccactgagcgtcagaccccgtagaaaagatcaaaggatcttcttgagatcctttttttctgcgcgtaatctgctgcttgcaaacaaaaaaaccaccgctaccagcggtggtttgtttgccggatcaagagctaccaactctttttccgaaggtaactggcttcagcagagcgcagataccaaatactgtccttctagtgtagccgtagttaggccaccacttcaagaactctgtagcaccgcctacatacctcgctctgctaatcctgttaccagtggctgctgccagtggcgataagtcgtgtcttaccgggttggactcaagacgatagttaccggataaggcgcagcggtcgggctgaacggggggttcgtgcacacagcccagcttggagcgaacgacctacaccgaactgagatacctacagcgtgagctatgagaaagcgccacgcttcccgaagggagaaaggcggacaggtatccggtaagcggcagggtcggaacaggagagcgcacgagggagcttccagggggaaacgcctggtatctttatagtcctgtcgggtttcgccacctctgacttgagcgtcgatttttgtgatgctcgtcaggggggcggagcctatggaaaaacgccagcaacgcggcctttttacggttcctggccttttgctgg

SEQ ID NO: 378 - DNA, 7389 bp, Artificial
  Synthetic
agacttagggaccctgcggccgccattaattcctaatttttgttgacactctatcattgatagagttattttaccactccctatcagtgatagagaaaagtgaaatgaatagaccggccgctgagaaaaagcgaagcggcactgctctttaacaatttatcagacaatctgtgtgggcactcgaagatacggattcttaacgtcgcaagacgaaaaatgaataccaagtctcaagagtgaacacgtaattcattacgaagtttaattctttgagcgtcaaacttttgaactgaagagtttgatcatggctcagattgaacgctggcggcaggcctaacacatgcaagtcgagcggatgaagggagcttgctcctggattcagcggcggacgggtgagtaatgcctaggaatctgcctggtagtgggggataacgtccggaaacgggcgctaataccgcatacgtcctgagggagaaagtgggggatcttcggacctcacgctatcagatgagcctaggtcggattagctagttggtggggtaaaggcctaccaaggcgacgatccgtaactggtctgagaggatgatcagtcacactggaactgagacacggtccagactcctacgggaggcagcagtggggaatattggacaatgggcgaaagcctgatccagccatgccgcgtgtgtgaagaaggtcttcggattgtaaagcactttaagttgggaggaagggcagtaagttaataccttgctgttttgacgttaccaacagaataagcaccggctaacttcgtgccagcagccgcggtaatacgaagggtgcaagcgttaatcggaattactgggcgtaaagcgcgcgtaggtggttcagcaagttggatgtgaaatccccgggctcaacctgggaactgcatccaaaactactgagctagagtacggtagagggtggtggaatttcctgtgtagcggtgaaatgcgtagatataggaaggaacaccagtggcgaaggcgaccacctggactgatactgacactgaggtgcgaaagcgtggggagcaaacaggattagataccctggtagtccacgccgtaaacgatgtcgactagccgttgggatccttgagatcttagtggcgcagctaacgcgataagtcgaccgcctggggagtacggccgcaaggttaaaactcaaatgaattgacgggggcccgcacaagcggtggagcatgtggtttaattcgaagcaacgcgaagaaccttacctggccttgacatgctgagaactttccagagatggattggtgccttcgggaactcagacacaggtgctgcatggctgtcgtcagctcgtgtcgtgagatgttgggttaagtcccgtaacgagcgcaacccttgtccttagttaccagcacctcgggtgggcactctaaggagactgccggtgacaaaccggaggaaggtggggatgacgtcaagtcatcatggcccttacggccagggctacacacgtgctacaatggtcggtacaaagggttgccaagccgcgaggtggagctaatcccataaaaccgatcgtagtccggatcgcagtctgcaactcgactgcgtgaagtcggaatcgctagtaatcgtgaatcagaatgtcacggtgaatacgttcccgggccttgtacacaccgcccgtcacaccatgggagtgggttgctccagaagtagctagtctaaccggtcaacagccgtttgagctaaccggtactaatgaaccgtgaggcttaaccttgagaggttaagcgactaagcgtacacggtggatgccctggcagtcagaggcgatgaaggacgtgctaatctgcgataagcgtcggtaaggtgatatgaaccgttataaccggcgatttccgaatggggaaacccagtgtgtttcgacacactatcattaactgaatccataggttaatgaggcgaaccgggggaactgaaacatctaagtaccccgaggaaaagaaatcaaccgagattcccccagtagcggcgagcgaacggggagcagcccagagcctgaatcagtgtgtgtgttagtggaagcgtctggaaaggcgcgcgatacagggtgacagccccgtacacaaaaatgcacatgctgtgagctcgatgagtagggcgggacacgtggtatcctgtctgaatatggggggaccatcctccaaggctaaatactcctgactgaccgatagtgaaccagtaccgtgagggaaaggcgaaaagaaccccggcgaggggagtgaaaaagaacctgaaaccgtgtacgtacaagcagtgggagcacgcttaggcgtgtgactgcgtaccttttgtataatgggtcagcgacttatattctgtagcaaggttaaccgaataggggagccgaagggaaaccgagtcttaactgggcgttaagttgcagggtatagacccgaaacccggtgatctagccatgggcaggttgaaggttgggtaacactaactggaggaccgaaccgactaatgttgaaaaattagcggatgacttgtggctgggggtgaaaggccaatcaaaccgggagatagctggttctccccgaaagctatttaggtagcgcctcgtgaattcatctccgggggtagagcactgtttcggcaagggggtcatcccgacttaccaacccgatgcaaactgcgaataccggagaatgttatcacgggagacacacggcgggtgctaacgtccgtcgtgaagagggaaacaacccagaccgccagctaaggtcccaaagtcatggttaagtgggaaacgatgtgggaaggcccagacagccaggatgttggcttagaagcagccatcatttaaagaaagcgtaatagctcactggtcgagtcggcctgcgcggaagatgtaacggggctaaaccatgcaccgaagctgcggcagcgacgcttatgcgttgttgggtaggggagcgttctgtaagcctgcgaaggtgtgctgtgaggcatgctggaggtatcagaagtgcgaatgctgacataagtaacgataaagcgggtgaaaagcccgctcgccggaagaccaagggttcctgtccaacgttaatcggggcagggtgagtcgacccctaaggcgaggccgaaaggcgtagtcgatgggaaacaggttaatattcctgtacttggtgttactgcgaaggggggacggagaaggctatgttggccgggcgacggttgtcccggtttaagcgtgtaggctggttttccaggcaaatccggaaaatcaaggctgaggcgtgatgacgaggcactacggtgctgaagcaacaaatgccctgcttccaggaaaagcctctaagcatcaggtaacatcaaatcgtaccccaaaccgacacaggtggtcaggtagagaataccaaggcgcttgagagaactcgggtgaaggaactaggcaaaatggtgccgtaacttcgggagaaggcacgctgatatgtaggtgaggtccctcgcggatggagctgaaatcagtcgaagataccagctggctgcaactgtttattaaaaacacagcactgtgcaaacacgaaagtggacgtatacggtgtgacgcctgcccggtgccggaaggttaattgatggggttagcgcaagcgaagctcttgatcgaagccccggtaaacggcggccgtaactataacggtcctaaggtagcgaaattccttgtcgggtaagttccgacctgcacgaatggcgtaatgatggccaggctgtctccacccgagactcagtgaaattgaactcgctgtgaagatgcagtgtacccgcggcaagacggaaagaccccgtgaacctttactatagcttgacactgaacattgagccttgatgtgtaggataggtgggaggctttgaagtgtggacgccagtctgcatggagccgaccttgaaataccaccctttaatgtttgatgttctaacgttgacccgtaatccgggttgcggacagtgtctggtgggtagtttgactggggcggtctcctcctaaagagtaacggaggagcacgaaggttggctaatcctggtcggacatcaggaggttagtgcaatggcataagccagcttgactgcgagcgtgacggcgcgagcaggtgcgaaagcaggtcatagtgatccggtggttctgaatggaagggccatcgctcaacggataaaaggtactccggggataacaggctgataccgcccaagagttcatatcgacggcggtgtttggcacctcgatgtcggctcatcacatcctggggctgaagtaggtcccaagggtatggctgttcgccatttaaagtggtacgcgagctgggtttagaacgtcgtgagacagttcggtccctatctgccgtgggcgctggagaactgaggggggctgctcctagtacgagaggaccggagtggacgcatcactggtgttcgggttgtcatgccaatggcactgcccggtagctaaatgcggaagagataagtgctgaaagcatctaagcacgaaacttgccccgagatgagttctccctgaccctttaagggtcctgaaggaacgttgaagacgacgacgttgataggccgggtgtgtaaacggacatggttgcaagggggacggttaccacggagtgattcatgactggggtgaagtcgtaacaaggtagccgtaggggaacctgcggctggatcatgtggttaccttaaagaagcgtactttgtagtgctcacacagattgtctgatagaaagtgaaaagcaaggcgtttacgcgttgggagtgaggctgaagagaataaggccgttcgctttctattaatgaaagctcaccctacacgaaaatatcacgcaacgcgtgataagcaattttcgtgtccccttcgtctagaggcccaggacaccgccctttcacggcggtaacaggggttcgaatcccctaggggacgccacttgctggtttgtgagtgaaagtcgccgaccttaatatctcaaaactcatcttcgggtgatgtttgagatatttgctctttaaaaatctggatcaagctgaaaattgaaacactgaacaacgagagttgttcgtgagtctctcaaattttcgcaacacgatgatgaatcgaaaggcggatgagagaagattttcagcctgatacagattaaatcagaacgcagaagcggtctgataaaacagaatttgcctggcggcagtagcgcggtggtcccacctgaccccatgccgaactcagaagtgaaacgccgtagcgccgatggtagtgtggggtctccccatgcgagagtagggaactgccaggcatcaaataaaacgaaaggctcagtcgaaagactgggcctttcgttttatctgttgtttgtcggtgaacgctctcctgagtaggacaaatccgccgggagcggatttgaacgttgcgaagcaacggcccggagggtggcgggcaggacgcccgccataaactgccaggcatcaaattaagcagaaggccatcctgacggatggcctttttgcgtttctacaaactcttcctgtcgtcatatctacaagccggcgcgccgggaaatgtgcgcggaacccctatttgtttatttttctaaatacattcaaatatgtatccgctcatgagacaataaccctgataaatgcttcaataatattgaaaaaggaagagtatgagtattcaacatttccgtgtcgcccttattcccttttttgcggcattttgccttcctgtttttgctcacccagaaacgctggtgaaagtaaaagatgctgaagatcagttgggtgcacgagtgggttacatcgaactggatctcaacagcggtaagatccttgagagttttcgccccgaagaacgttttccaatgatgagcacttttaaagttctgctatgtggcgcggtattatcccgtgttgacgccgggcaagagcaactcggtcgccgcatacactattctcagaatgacttggttgagtactcaccagtcacagaaaagcatcttacggatggcatgacagtaagagaattatgcagtgctgcaataaccatgagtgataacactgcggccaacttacttctgacaacgatcggaggaccgaaggagctaaccgcttttttgcacaacatgggggatcatgtaactcgccttgatcgttgggaaccggagctgaatgaagccataccaaacgacgagcgtgacaccacgatgcctgcagcaatggcaacaacgttgcgcaaactattaactggcgaactacttactctagcttcccggcaacaattaatagactggatggaggcggataaagttgcaggaccacttctgcgctcggcccttccggctagctggtttattgctgataaatctggagccggtgagcgtgggtctcgcggtatcattgcagcactggggccagatggtaagccctcccgtatcgtagttatctacacgacggggagtcaggcaactatggatgaacgaaatagacagatcgctgagataggtgcctcactgattaagcattggtaactgcagaccaagtttactcatatatactttagattgatttaaaacttcatttttaatttaaaaggatctaggtgaagatcctttttgataatctcatgaccaaaatcccttaacgtgagttttcgttccactgagcgtcagaccccgtagaaaagatcaaaggatcttcttgagatcctttttttctgcgcgtaatctgctgcttgcaaacaaaaaaaccaccgctaccagcggtggtttgtttgccggatcaagagctaccaactctttttccgaaggtaactggcttcagcagagcgcagataccaaatactgtccttctagtgtagccgtagttaggccaccacttcaagaactctgtagcaccgcctacatacctcgctctgctaatcctgttaccagtggctgctgccagtggcgataagtcgtgtcttaccgggttggactcaagacgatagttaccggataaggcgcagcggtcgggctgaacggggggttcgtgcacacagcccagcttggagcgaacgacctacaccgaactgagatacctacagcgtgagctatgagaaagcgccacgcttcccgaagggagaaaggcggacaggtatccggtaagcggcagggtcggaacaggagagcgcacgagggagcttccagggggaaacgcctggtatctttatagtcctgtcgggtttcgccacctctgacttgagcgtcgatttttgtgatgctcgtcaggggggcggagcctatggaaaaacgccagcaacgcggcctttttacggttcctggccttttgctgg

SEQ ID NO: 379 - DNA, 7387 bp, Artificial
  Synthetic
agacttagggaccctgcggccgccattaattcctaatttttgttgacactctatcattgatagagttattttaccactccctatcagtgatagagaaaagtgaaatgaatagaccggccgctgagaaaaagcgaagcggcactgctctttaacaatttatcagacaatctgtgtgggcactcgaagatacggattcttaacgtcgcaagacgaaaaatgaataccaagtctcaagagtgaacacgtaattcattacgaagtttaattctttgagcgtcaaactttttaactgaagagtttgatcatggctcagattgaacgctggcggcaggcttaacacatgcaagtcgagcgggggaaggtagcttgctaccggacctagcggcggacgggtgagtaatgcttaggaatctgcctattagtgggggacaacatctcgaaagggatgctaataccgcatacgtcctacgggagaaagcaggggatcttcggaccttgcgctaatagatgagcctaagtcggattagctagttggtggggtaaaggcctaccaaggcgacgatctgtagcgggtctgagaggatgatccgccacactgggactgagacacggcccagactcctacgggaggcagcagtggggaatattggacaatgggcgcaagcctgatccagccatgccgcgtgtgtgaagaaggccttatggttgtaaagcactttaagcgaggaggaggctactttagataatacctagagatagtggacgttactcgcagaataagcaccggctaactctgtgccagcagccgcggtaatacagagggtgcaagcgttaatcggatttactgggcgtaaagcgcgcgtaggcggctaattaagtcaaatgtgaaatccccgagcttaacttgggaattgcattcgatactggttagctagagtgtgggagaggatggtagaattccaggtgtagcggtgaaatgcgtagagatctggaggaataccgatggcgaaggcagccatctggcctaacactgacgctgaggtgcgaaagcatggggagcaaacaggattagataccctggtagtccatgccgtaaacgatgtctactagccgttggggcctttgaggctttagtggcgcagctaacgcgataagtagaccgcctggggagtacggtcgcaagactaaaactcaaatgaattgacgggggcccgcacaagcggtggagcatgtggtttaattcgatgcaacgcgaagaaccttacctggccttgacatagtaagaactttccagagatggattggtgccttcgggaacttacatacaggtgctgcatggctgtcgtcagctcgtgtcgtgagatgttgggttaagtcccgcaacgagcgcaacccttttccttatttgccagcgagtaatgtcgggaactttaaggatactgccagtgacaaactggaggaaggcggggacgacgtcaagtcatcatggcccttacggccagggctacacacgtgctacaatggtcggtacaaagggttgctacacagcgatgtgatgctaatctcaaaaagccgatcgtagtccggattggagtctgcaactcgactccatgaagtcggaatcgctagtaatcgcggatcagaatgccgcggtgaatacgttcccgggccttgtacacaccgcccgtcacaccatgggagtttgttgcaccagaagtagctagcctaacggtcaacagccgtttgagctaaccggtactaatgaaccgtgaggcttaaccttgagaggttaagcgactaagcgtacacggtggatgccctggcagtcagaggcgatgaaggacgtgctaatctgcgataagcgtcggtaaggtgatatgaaccgttataaccggcgatttccgaatggggaaacccagtgtgtttcgacacactatcattaactgaatccataggttaatgaggcgaaccgggggaactgaaacatctaagtaccccgaggaaaagaaatcaaccgagattcccccagtagcggcgagcgaacggggagcagcccagagcctgaatcagtgtgtgtgttagtggaagcgtctggaaaggcgcgcgatacagggtgacagccccgtacacaaaaatgcacatgctgtgagctcgatgagtagggcgggacacgtggtatcctgtctgaatatggggggaccatcctccaaggctaaatactcctgactgaccgatagtgaaccagtaccgtgagggaaaggcgaaaagaaccccggcgaggggagtgaaaaagaacctgaaaccgtgtacgtacaagcagtgggagcacgcttaggcgtgtgactgcgtaccttttgtataatgggtcagcgacttatattctgtagcaaggttaaccgaataggggagccgaagggaaaccgagtcttaactgggcgttaagttgcagggtatagacccgaaacccggtgatctagccatgggcaggttgaaggttgggtaacactaactggaggaccgaaccgactaatgttgaaaaattagcggatgacttgtggctgggggtgaaaggccaatcaaaccgggagatagctggttctccccgaaagctatttaggtagcgcctcgtgaattcatctccgggggtagagcactgtttcggcaagggggtcatcccgacttaccaacccgatgcaaactgcgaataccggagaatgttatcacgggagacacacggcgggtgctaacgtccgtcgtgaagagggaaacaacccagaccgccagctaaggtcccaaagtcatggttaagtgggaaacgatgtgggaaggcccagacagccaggatgttggcttagaagcagccatcatttaaagaaagcgtaatagctcactggtcgagtcggcctgcgcggaagatgtaacggggctaaaccatgcaccgaagctgcggcagcgacgcttatgcgttgttgggtaggggagcgttctgtaagcctgcgaaggtgtgctgtgaggcatgctggaggtatcagaagtgcgaatgctgacataagtaacgataaagcgggtgaaaagcccgctcgccggaagaccaagggttcctgtccaacgttaatcggggcagggtgagtcgacccctaaggcgaggccgaaaggcgtagtcgatgggaaacaggttaatattcctgtacttggtgttactgcgaaggggggacggagaaggctatgttggccgggcgacggttgtcccggtttaagcgtgtaggctggttttccaggcaaatccggaaaatcaaggctgaggcgtgatgacgaggcactacggtgctgaagcaacaaatgccctgcttccaggaaaagcctctaagcatcaggtaacatcaaatcgtaccccaaaccgacacaggtggtcaggtagagaataccaaggcgcttgagagaactcgggtgaaggaactaggcaaaatggtgccgtaacttcgggagaaggcacgctgatatgtaggtgaggtccctcgcggatggagctgaaatcagtcgaagataccagctggctgcaactgtttattaaaaacacagcactgtgcaaacacgaaagtggacgtatacggtgtgacgcctgcccggtgccggaaggttaattgatggggttagcgcaagcgaagctcttgatcgaagccccggtaaacggcggccgtaactataacggtcctaaggtagcgaaattccttgtcgggtaagttccgacctgcacgaatggcgtaatgatggccaggctgtctccacccgagactcagtgaaattgaactcgctgtgaagatgcagtgtacccgcggcaagacggaaagaccccgtgaacctttactatagcttgacactgaacattgagccttgatgtgtaggataggtgggaggctttgaagtgtggacgccagtctgcatggagccgaccttgaaataccaccctttaatgtttgatgttctaacgttgacccgtaatccgggttgcggacagtgtctggtgggtagtttgactggggcggtctcctcctaaagagtaacggaggagcacgaaggttggctaatcctggtcggacatcaggaggttagtgcaatggcataagccagcttgactgcgagcgtgacggcgcgagcaggtgcgaaagcaggtcatagtgatccggtggttctgaatggaagggccatcgctcaacggataaaaggtactccggggataacaggctgataccgcccaagagttcatatcgacggcggtgtttggcacctcgatgtcggctcatcacatcctggggctgaagtaggtcccaagggtatggctgttcgccatttaaagtggtacgcgagctgggtttagaacgtcgtgagacagttcggtccctatctgccgtgggcgctggagaactgaggggggctgctcctagtacgagaggaccggagtggacgcatcactggtgttcgggttgtcatgccaatggcactgcccggtagctaaatgcggaagagataagtgctgaaagcatctaagcacgaaacttgccccgagatgagttctccctgaccctttaagggtcctgaaggaacgttgaagacgacgacgttgataggccgggtgtgtaaacggacatggttaagagggcggttaccacggtgtggccgatgactggggtgaagtcgtaacaaggtagccgtaggggaacctgcggctggatcatgtggtatccttaaagaagcgtactttgtagtgctcacacagattgtctgatagaaagtgaaaagcaaggcgtttacgcgttgggagtgaggctgaagagaataaggccgttcgctttctattaatgaaagctcaccctacacgaaaatatcacgcaacgcgtgataagcaattttcgtgtccccttcgtctagaggcccaggacaccgccctttcacggcggtaacaggggttcgaatcccctaggggacgccacttgctggtttgtgagtgaaagtcgccgaccttaatatctcaaaactcatcttcgggtgatgtttgagatatttgctctttaaaaatctggatcaagctgaaaattgaaacactgaacaacgagagttgttcgtgagtctctcaaattttcgcaacacgatgatgaatcgaaaggcggatgagagaagattttcagcctgatacagattaaatcagaacgcagaagcggtctgataaaacagaatttgcctggcggcagtagcgcggtggtcccacctgaccccatgccgaactcagaagtgaaacgccgtagcgccgatggtagtgtggggtctccccatgcgagagtagggaactgccaggcatcaaataaaacgaaaggctcagtcgaaagactgggcctttcgttttatctgttgtttgtcggtgaacgctctcctgagtaggacaaatccgccgggagcggatttgaacgttgcgaagcaacggcccggagggtggcgggcaggacgcccgccataaactgccaggcatcaaattaagcagaaggccatcctgacggatggcctttttgcgtttctacaaactcttcctgtcgtcatatctacaagccggcgcgccgggaaatgtgcgcggaacccctatttgtttatttttctaaatacattcaaatatgtatccgctcatgagacaataaccctgataaatgcttcaataatattgaaaaaggaagagtatgagtattcaacatttccgtgtcgcccttattcccttttttgcggcattttgccttcctgtttttgctcacccagaaacgctggtgaaagtaaaagatgctgaagatcagttgggtgcacgagtgggttacatcgaactggatctcaacagcggtaagatccttgagagttttcgccccgaagaacgttttccaatgatgagcacttttaaagttctgctatgtggcgcggtattatcccgtgttgacgccgggcaagagcaactcggtcgccgcatacactattctcagaatgacttggttgagtactcaccagtcacagaaaagcatcttacggatggcatgacagtaagagaattatgcagtgctgcaataaccatgagtgataacactgcggccaacttacttctgacaacgatcggaggaccgaaggagctaaccgcttttttgcacaacatgggggatcatgtaactcgccttgatcgttgggaaccggagctgaatgaagccataccaaacgacgagcgtgacaccacgatgcctgcagcaatggcaacaacgttgcgcaaactattaactggcgaactacttactctagcttcccggcaacaattaatagactggatggaggcggataaagttgcaggaccacttctgcgctcggcccttccggctagctggtttattgctgataaatctggagccggtgagcgtgggtctcgcggtatcattgcagcactggggccagatggtaagccctcccgtatcgtagttatctacacgacggggagtcaggcaactatggatgaacgaaatagacagatcgctgagataggtgcctcactgattaagcattggtaactgcagaccaagtttactcatatatactttagattgatttaaaacttcatttttaatttaaaaggatctaggtgaagatcctttttgataatctcatgaccaaaatcccttaacgtgagttttcgttccactgagcgtcagaccccgtagaaaagatcaaaggatcttcttgagatcctttttttctgcgcgtaatctgctgcttgcaaacaaaaaaaccaccgctaccagcggtggtttgtttgccggatcaagagctaccaactctttttccgaaggtaactggcttcagcagagcgcagataccaaatactgtccttctagtgtagccgtagttaggccaccacttcaagaactctgtagcaccgcctacatacctcgctctgctaatcctgttaccagtggctgctgccagtggcgataagtcgtgtcttaccgggttggactcaagacgatagttaccggataaggcgcagcggtcgggctgaacggggggttcgtgcacacagcccagcttggagcgaacgacctacaccgaactgagatacctacagcgtgagctatgagaaagcgccacgcttcccgaagggagaaaggcggacaggtatccggtaagcggcagggtcggaacaggagagcgcacgagggagcttccagggggaaacgcctggtatctttatagtcctgtcgggtttcgccacctctgacttgagcgtcgatttttgtgatgctcgtcaggggggcggagcctatggaaaaacgccagcaacgcggcctttttacggttcctggccttttgctgg

SEQ ID NO: 380 - DNA, 7390 bp, Artificial
  Synthetic
agacttagggaccctgcggccgccattaattcctaatttttgttgacactctatcattgatagagttattttaccactccctatcagtgatagagaaaagtgaaatgaatagaccggccgctgagaaaaagcgaagcggcactgctctttaacaatttatcagacaatctgtgtgggcactcgaagatacggattcttaacgtcgcaagacgaaaaatgaataccaagtctcaagagtgaacacgtaattcattacgaagtttaattctttgagcgtcaaacttttaaactgaagagtttgatcctggctcagattgaacgctagcgggatgctttacacatgcaagtcgaacggcagcgcgagagagcttgctctcttggcggcgagtggcggacgggtgagtaatatatcggaacgtgcccagtagcgggggataactactcgaaagagtggctaataccgcatacgccctacgggggaaagggggggatcgcaagacctctcactattggagcggccgatatcggattagctagttggtggggtaaaggctcaccaaggcaacgatccgtagctggtttgagaggacgaccagccacactgggactgagacacggcccagactcctacgggaggcagcagtggggaattttggacaatgggggaaaccctgatccagccatcccgcgtgtatgatgaaggccttcgggttgtaaagtacttttggcagagaagaaaaggtacctcctaatacgaggtactgctgacggtatctgcagaataagcaccggctaactacgtgccagcagccgcggtaatacgtagggtgcaagcgttaatcggaattactgggcgtaaagcgtgtgtaggcggttcggaaagaaagatgtgaaatcccagggctcaaccttggaactgcatttttaactgccgagctagagtatgtcagaggggggtagaattccacgtgtagcagtgaaatgcgtagatatgtggaggaataccgatggcgaaggcagccccctgggataatactgacgctcagacacgaaagcgtggggagcaaacaggattagataccctggtagtccacgccctaaacgatgtcaactagctgttggggccgttaggccttagtagcgcagctaacgcgtgaagttgaccgcctggggagtacggtcgcaagattaaaactcaaaggaattgacggggacccgcacaagcggtggatgatgtggattaattcgatgcaacgcgaaaaaccttacctacccttgacatgtctggaaagccgaagagatttggccgtgctcgcaagagaaccggaacacaggtgctgcatggctgtcgtcagctcgtgtcgtgagatgttgggttaagtcccgcaacgagcgcaacccttgtcattagttgctacgcaagagcactctaatgagactgccggtgacaaaccggaggaaggtggggatgacgtcaagtcctcatggcccttatgggtagggcttcacacgtcatacaatggtcgggacagagggtcgccaacccgcgagggggagccaatctcagaaacccgatcgtagtccggatcgcagtctgcaactcgactgcgtgaagtcggaatcgctagtaatcgcggatcagaatgtcgcggtgaatacgttcccgggtcttgtacacaccgcccgtcacaccatgggagtgggtttcaccagaagtaggtagcctaaccggtcaacagccgtttgagctaaccggtactaatgaaccgtgaggcttaaccttgagaggttaagcgactaagcgtacacggtggatgccctggcagtcagaggcgatgaaggacgtgctaatctgcgataagcgtcggtaaggtgatatgaaccgttataaccggcgatttccgaatggggaaacccagtgtgtttcgacacactatcattaactgaatccataggttaatgaggcgaaccgggggaactgaaacatctaagtaccccgaggaaaagaaatcaaccgagattcccccagtagcggcgagcgaacggggagcagcccagagcctgaatcagtgtgtgtgttagtggaagcgtctggaaaggcgcgcgatacagggtgacagccccgtacacaaaaatgcacatgctgtgagctcgatgagtagggcgggacacgtggtatcctgtctgaatatggggggaccatcctccaaggctaaatactcctgactgaccgatagtgaaccagtaccgtgagggaaaggcgaaaagaaccccggcgaggggagtgaaaaagaacctgaaaccgtgtacgtacaagcagtgggagcacgcttaggcgtgtgactgcgtaccttttgtataatgggtcagcgacttatattctgtagcaaggttaaccgaataggggagccgaagggaaaccgagtcttaactgggcgttaagttgcagggtatagacccgaaacccggtgatctagccatgggcaggttgaaggttgggtaacactaactggaggaccgaaccgactaatgttgaaaaattagcggatgacttgtggctgggggtgaaaggccaatcaaaccgggagatagctggttctccccgaaagctatttaggtagcgcctcgtgaattcatctccgggggtagagcactgtttcggcaagggggtcatcccgacttaccaacccgatgcaaactgcgaataccggagaatgttatcacgggagacacacggcgggtgctaacgtccgtcgtgaagagggaaacaacccagaccgccagctaaggtcccaaagtcatggttaagtgggaaacgatgtgggaaggcccagacagccaggatgttggcttagaagcagccatcatttaaagaaagcgtaatagctcactggtcgagtcggcctgcgcggaagatgtaacggggctaaaccatgcaccgaagctgcggcagcgacgcttatgcgttgttgggtaggggagcgttctgtaagcctgcgaaggtgtgctgtgaggcatgctggaggtatcagaagtgcgaatgctgacataagtaacgataaagcgggtgaaaagcccgctcgccggaagaccaagggttcctgtccaacgttaatcggggcagggtgagtcgacccctaaggcgaggccgaaaggcgtagtcgatgggaaacaggttaatattcctgtacttggtgttactgcgaaggggggacggagaaggctatgttggccgggcgacggttgtcccggtttaagcgtgtaggctggttttccaggcaaatccggaaaatcaaggctgaggcgtgatgacgaggcactacggtgctgaagcaacaaatgccctgcttccaggaaaagcctctaagcatcaggtaacatcaaatcgtaccccaaaccgacacaggtggtcaggtagagaataccaaggcgcttgagagaactcgggtgaaggaactaggcaaaatggtgccgtaacttcgggagaaggcacgctgatatgtaggtgaggtccctcgcggatggagctgaaatcagtcgaagataccagctggctgcaactgtttattaaaaacacagcactgtgcaaacacgaaagtggacgtatacggtgtgacgcctgcccggtgccggaaggttaattgatggggttagcgcaagcgaagctcttgatcgaagccccggtaaacggcggccgtaactataacggtcctaaggtagcgaaattccttgtcgggtaagttccgacctgcacgaatggcgtaatgatggccaggctgtctccacccgagactcagtgaaattgaactcgctgtgaagatgcagtgtacccgcggcaagacggaaagaccccgtgaacctttactatagcttgacactgaacattgagccttgatgtgtaggataggtgggaggctttgaagtgtggacgccagtctgcatggagccgaccttgaaataccaccctttaatgtttgatgttctaacgttgacccgtaatccgggttgcggacagtgtctggtgggtagtttgactggggcggtctcctcctaaagagtaacggaggagcacgaaggttggctaatcctggtcggacatcaggaggttagtgcaatggcataagccagcttgactgcgagcgtgacggcgcgagcaggtgcgaaagcaggtcatagtgatccggtggttctgaatggaagggccatcgctcaacggataaaaggtactccggggataacaggctgataccgcccaagagttcatatcgacggcggtgtttggcacctcgatgtcggctcatcacatcctggggctgaagtaggtcccaagggtatggctgttcgccatttaaagtggtacgcgagctgggtttagaacgtcgtgagacagttcggtccctatctgccgtgggcgctggagaactgaggggggctgctcctagtacgagaggaccggagtggacgcatcactggtgttcgggttgtcatgccaatggcactgcccggtagctaaatgcggaagagataagtgctgaaagcatctaagcacgaaacttgccccgagatgagttctccctgaccctttaagggtcctgaaggaacgttgaagacgacgacgttgataggccgggtgtgtaaacggacatggttgtaaggagggcgcttaccacggtgggattcatgactggggtgaagtcgtaacaaggtagccgtatcggaaggtgcggctggatcatgtggtttccttaaagaagcgtactttgtagtgctcacacagattgtctgatagaaagtgaaaagcaaggcgtttacgcgttgggagtgaggctgaagagaataaggccgttcgctttctattaatgaaagctcaccctacacgaaaatatcacgcaacgcgtgataagcaattttcgtgtccccttcgtctagaggcccaggacaccgccctttcacggcggtaacaggggttcgaatcccctaggggacgccacttgctggtttgtgagtgaaagtcgccgaccttaatatctcaaaactcatcttcgggtgatgtttgagatatttgctctttaaaaatctggatcaagctgaaaattgaaacactgaacaacgagagttgttcgtgagtctctcaaattttcgcaacacgatgatgaatcgaaaggcggatgagagaagattttcagcctgatacagattaaatcagaacgcagaagcggtctgataaaacagaatttgcctggcggcagtagcgcggtggtcccacctgaccccatgccgaactcagaagtgaaacgccgtagcgccgatggtagtgtggggtctccccatgcgagagtagggaactgccaggcatcaaataaaacgaaaggctcagtcgaaagactgggcctttcgttttatctgttgtttgtcggtgaacgctctcctgagtaggacaaatccgccgggagcggatttgaacgttgcgaagcaacggcccggagggtggcgggcaggacgcccgccataaactgccaggcatcaaattaagcagaaggccatcctgacggatggcctttttgcgtttctacaaactcttcctgtcgtcatatctacaagccggcgcgccgggaaatgtgcgcggaacccctatttgtttatttttctaaatacattcaaatatgtatccgctcatgagacaataaccctgataaatgcttcaataatattgaaaaaggaagagtatgagtattcaacatttccgtgtcgcccttattcccttttttgcggcattttgccttcctgtttttgctcacccagaaacgctggtgaaagtaaaagatgctgaagatcagttgggtgcacgagtgggttacatcgaactggatctcaacagcggtaagatccttgagagttttcgccccgaagaacgttttccaatgatgagcacttttaaagttctgctatgtggcgcggtattatcccgtgttgacgccgggcaagagcaactcggtcgccgcatacactattctcagaatgacttggttgagtactcaccagtcacagaaaagcatcttacggatggcatgacagtaagagaattatgcagtgctgcaataaccatgagtgataacactgcggccaacttacttctgacaacgatcggaggaccgaaggagctaaccgcttttttgcacaacatgggggatcatgtaactcgccttgatcgttgggaaccggagctgaatgaagccataccaaacgacgagcgtgacaccacgatgcctgcagcaatggcaacaacgttgcgcaaactattaactggcgaactacttactctagcttcccggcaacaattaatagactggatggaggcggataaagttgcaggaccacttctgcgctcggcccttccggctagctggtttattgctgataaatctggagccggtgagcgtgggtctcgcggtatcattgcagcactggggccagatggtaagccctcccgtatcgtagttatctacacgacggggagtcaggcaactatggatgaacgaaatagacagatcgctgagataggtgcctcactgattaagcattggtaactgcagaccaagtttactcatatatactttagattgatttaaaacttcatttttaatttaaaaggatctaggtgaagatcctttttgataatctcatgaccaaaatcccttaacgtgagttttcgttccactgagcgtcagaccccgtagaaaagatcaaaggatcttcttgagatcctttttttctgcgcgtaatctgctgcttgcaaacaaaaaaaccaccgctaccagcggtggtttgtttgccggatcaagagctaccaactctttttccgaaggtaactggcttcagcagagcgcagataccaaatactgtccttctagtgtagccgtagttaggccaccacttcaagaactctgtagcaccgcctacatacctcgctctgctaatcctgttaccagtggctgctgccagtggcgataagtcgtgtcttaccgggttggactcaagacgatagttaccggataaggcgcagcggtcgggctgaacggggggttcgtgcacacagcccagcttggagcgaacgacctacaccgaactgagatacctacagcgtgagctatgagaaagcgccacgcttcccgaagggagaaaggcggacaggtatccggtaagcggcagggtcggaacaggagagcgcacgagggagcttccagggggaaacgcctggtatctttatagtcctgtcgggtttcgccacctctgacttgagcgtcgatttttgtgatgctcgtcaggggggcggagcctatggaaaaacgccagcaacgcggcctttttacggttcctggccttttgctgg

SEQ ID NO: 381 - DNA, 7386 bp, Artificial
  Synthetic
agacttagggaccctgcggccgccattaattcctaatttttgttgacactctatcattgatagagttattttaccactccctatcagtgatagagaaaagtgaaatgaatagaccggccgctgagaaaaagcgaagcggcactgctctttaacaatttatcagacaatctgtgtgggcactcgaagatacggattcttaacgtcgcaagacgaaaaatgaataccaagtctcaagagtgaacacgtaattcattacgaagtttaattctttgagcgtcaaacttttgaactgaagagtttgatcctggctcagattgaacgctggcggcatgccttacacatgcaagtcgaacggcagcacgggtgcttgcacctggtggcgagtggcgaacgggtgagtaatacatcggaacatgtcctgtagtgggggatagcccggcgaaagccggattaataccgcatacgatccatggatgaaagcgggggaccttcgggcctcgcgctatagggttggccgatggctgattagctagttggtggggtaaaggcctaccaaggcgacgatcagtagctggtctgagaggacgaccagccacactgggactgagacacggcccagactcctacgggaggcagcagtggggaattttggacaatgggcgaaagcctgatccagcaatgccgcgtgtgtgaagaaggccttcgggttgtaaagcacttttgtccggaaagaaatccttggctctaatacagtcgggggatgacggtaccggaagaataagcaccggctaactacgtgccagcagccgcggtaatacgtagggtgcgagcgttaatcggaattactgggcgtaaagcgtgcgcaggcggtttgctaagaccgatgtgaaatccccgggctcaacctgggaactgcattggtgactggcaggctagagtatggcagaggggggtagaattccacgtgtagcagtgaaatgcgtagagatgtggaggaataccgatggcgaaggcagccccctgggccaatactgacgctcatgcacgaaagcgtggggagcaaacaggattagataccctggtagtccacgccctaaacgatgtcaactagttgttggggattcatttccttagtaacgtagctaacgcgtgaagttgaccgcctggggagtacggtcgcaagattaaaactcaaaggaattgacggggacccgcacaagcggtggatgatgtggattaattcgatgcaacgcgaaaaaccttacctacccttgacatggtcggaatcctgctgagaggtgggagtgctcgaaagagaaccggcgcacaggtgctgcatggctgtcgtcagctcgtgtcgtgagatgttgggttaagtcccgcaacgagcgcaacccttgtccttagttgctacgcaagagcactctaaggagactgccggtgacaaaccggaggaaggtggggatgacgtcaagtcctcatggcccttatgggtagggcttcacacgtcatacaatggtcggaacagagggttgccaacccgcgagggggagctaatcccagaaaaccgatcgtagtccggattgcactctgcaactcgagtgcatgaagctggaatcgctagtaatcgcggatcagcatgccgcggtgaatacgttcccgggtcttgtacacaccgcccgtcacaccatgggagtgggttttaccagaagtggctagtctaaccggtcaacagccgtttgagctaaccggtactaatgaaccgtgaggcttaaccttgagaggttaagcgactaagcgtacacggtggatgccctggcagtcagaggcgatgaaggacgtgctaatctgcgataagcgtcggtaaggtgatatgaaccgttataaccggcgatttccgaatggggaaacccagtgtgtttcgacacactatcattaactgaatccataggttaatgaggcgaaccgggggaactgaaacatctaagtaccccgaggaaaagaaatcaaccgagattcccccagtagcggcgagcgaacggggagcagcccagagcctgaatcagtgtgtgtgttagtggaagcgtctggaaaggcgcgcgatacagggtgacagccccgtacacaaaaatgcacatgctgtgagctcgatgagtagggcgggacacgtggtatcctgtctgaatatggggggaccatcctccaaggctaaatactcctgactgaccgatagtgaaccagtaccgtgagggaaaggcgaaaagaaccccggcgaggggagtgaaaaagaacctgaaaccgtgtacgtacaagcagtgggagcacgcttaggcgtgtgactgcgtaccttttgtataatgggtcagcgacttatattctgtagcaaggttaaccgaataggggagccgaagggaaaccgagtcttaactgggcgttaagttgcagggtatagacccgaaacccggtgatctagccatgggcaggttgaaggttgggtaacactaactggaggaccgaaccgactaatgttgaaaaattagcggatgacttgtggctgggggtgaaaggccaatcaaaccgggagatagctggttctccccgaaagctatttaggtagcgcctcgtgaattcatctccgggggtagagcactgtttcggcaagggggtcatcccgacttaccaacccgatgcaaactgcgaataccggagaatgttatcacgggagacacacggcgggtgctaacgtccgtcgtgaagagggaaacaacccagaccgccagctaaggtcccaaagtcatggttaagtgggaaacgatgtgggaaggcccagacagccaggatgttggcttagaagcagccatcatttaaagaaagcgtaatagctcactggtcgagtcggcctgcgcggaagatgtaacggggctaaaccatgcaccgaagctgcggcagcgacgcttatgcgttgttgggtaggggagcgttctgtaagcctgcgaaggtgtgctgtgaggcatgctggaggtatcagaagtgcgaatgctgacataagtaacgataaagcgggtgaaaagcccgctcgccggaagaccaagggttcctgtccaacgttaatcggggcagggtgagtcgacccctaaggcgaggccgaaaggcgtagtcgatgggaaacaggttaatattcctgtacttggtgttactgcgaaggggggacggagaaggctatgttggccgggcgacggttgtcccggtttaagcgtgtaggctggttttccaggcaaatccggaaaatcaaggctgaggcgtgatgacgaggcactacggtgctgaagcaacaaatgccctgcttccaggaaaagcctctaagcatcaggtaacatcaaatcgtaccccaaaccgacacaggtggtcaggtagagaataccaaggcgcttgagagaactcgggtgaaggaactaggcaaaatggtgccgtaacttcgggagaaggcacgctgatatgtaggtgaggtccctcgcggatggagctgaaatcagtcgaagataccagctggctgcaactgtttattaaaaacacagcactgtgcaaacacgaaagtggacgtatacggtgtgacgcctgcccggtgccggaaggttaattgatggggttagcgcaagcgaagctcttgatcgaagccccggtaaacggcggccgtaactataacggtcctaaggtagcgaaattccttgtcgggtaagttccgacctgcacgaatggcgtaatgatggccaggctgtctccacccgagactcagtgaaattgaactcgctgtgaagatgcagtgtacccgcggcaagacggaaagaccccgtgaacctttactatagcttgacactgaacattgagccttgatgtgtaggataggtgggaggctttgaagtgtggacgccagtctgcatggagccgaccttgaaataccaccctttaatgtttgatgttctaacgttgacccgtaatccgggttgcggacagtgtctggtgggtagtttgactggggcggtctcctcctaaagagtaacggaggagcacgaaggttggctaatcctggtcggacatcaggaggttagtgcaatggcataagccagcttgactgcgagcgtgacggcgcgagcaggtgcgaaagcaggtcatagtgatccggtggttctgaatggaagggccatcgctcaacggataaaaggtactccggggataacaggctgataccgcccaagagttcatatcgacggcggtgtttggcacctcgatgtcggctcatcacatcctggggctgaagtaggtcccaagggtatggctgttcgccatttaaagtggtacgcgagctgggtttagaacgtcgtgagacagttcggtccctatctgccgtgggcgctggagaactgaggggggctgctcctagtacgagaggaccggagtggacgcatcactggtgttcgggttgtcatgccaatggcactgcccggtagctaaatgcggaagagataagtgctgaaagcatctaagcacgaaacttgccccgagatgagttctccctgaccctttaagggtcctgaaggaacgttgaagacgacgacgttgataggccgggtgtgtaaacggacatggttgcaaggaggacggtcaccacggtaggattcatgactggggtgaagtcgtaacaaggtagccgtatcggaaggtgcggctggatcatgtggtttccttaaagaagcgtactttgtagtgctcacacagattgtctgatagaaagtgaaaagcaaggcgtttacgcgttgggagtgaggctgaagagaataaggccgttcgctttctattaatgaaagctcaccctacacgaaaatatcacgcaacgcgtgataagcaattttcgtgtccccttcgtctagaggcccaggacaccgccctttcacggcggtaacaggggttcgaatcccctaggggacgccacttgctggtttgtgagtgaaagtcgccgaccttaatatctcaaaactcatcttcgggtgatgtttgagatatttgctctttaaaaatctggatcaagctgaaaattgaaacactgaacaacgagagttgttcgtgagtctctcaaattttcgcaacacgatgatgaatcgaaaggcggatgagagaagattttcagcctgatacagattaaatcagaacgcagaagcggtctgataaaacagaatttgcctggcggcagtagcgcggtggtcccacctgaccccatgccgaactcagaagtgaaacgccgtagcgccgatggtagtgtggggtctccccatgcgagagtagggaactgccaggcatcaaataaaacgaaaggctcagtcgaaagactgggcctttcgttttatctgttgtttgtcggtgaacgctctcctgagtaggacaaatccgccgggagcggatttgaacgttgcgaagcaacggcccggagggtggcgggcaggacgcccgccataaactgccaggcatcaaattaagcagaaggccatcctgacggatggcctttttgcgtttctacaaactcttcctgtcgtcatatctacaagccggcgcgccgggaaatgtgcgcggaacccctatttgtttatttttctaaatacattcaaatatgtatccgctcatgagacaataaccctgataaatgcttcaataatattgaaaaaggaagagtatgagtattcaacatttccgtgtcgcccttattcccttttttgcggcattttgccttcctgtttttgctcacccagaaacgctggtgaaagtaaaagatgctgaagatcagttgggtgcacgagtgggttacatcgaactggatctcaacagcggtaagatccttgagagttttcgccccgaagaacgttttccaatgatgagcacttttaaagttctgctatgtggcgcggtattatcccgtgttgacgccgggcaagagcaactcggtcgccgcatacactattctcagaatgacttggttgagtactcaccagtcacagaaaagcatcttacggatggcatgacagtaagagaattatgcagtgctgcaataaccatgagtgataacactgcggccaacttacttctgacaacgatcggaggaccgaaggagctaaccgcttttttgcacaacatgggggatcatgtaactcgccttgatcgttgggaaccggagctgaatgaagccataccaaacgacgagcgtgacaccacgatgcctgcagcaatggcaacaacgttgcgcaaactattaactggcgaactacttactctagcttcccggcaacaattaatagactggatggaggcggataaagttgcaggaccacttctgcgctcggcccttccggctagctggtttattgctgataaatctggagccggtgagcgtgggtctcgcggtatcattgcagcactggggccagatggtaagccctcccgtatcgtagttatctacacgacggggagtcaggcaactatggatgaacgaaatagacagatcgctgagataggtgcctcactgattaagcattggtaactgcagaccaagtttactcatatatactttagattgatttaaaacttcatttttaatttaaaaggatctaggtgaagatcctttttgataatctcatgaccaaaatcccttaacgtgagttttcgttccactgagcgtcagaccccgtagaaaagatcaaaggatcttcttgagatcctttttttctgcgcgtaatctgctgcttgcaaacaaaaaaaccaccgctaccagcggtggtttgtttgccggatcaagagctaccaactctttttccgaaggtaactggcttcagcagagcgcagataccaaatactgtccttctagtgtagccgtagttaggccaccacttcaagaactctgtagcaccgcctacatacctcgctctgctaatcctgttaccagtggctgctgccagtggcgataagtcgtgtcttaccgggttggactcaagacgatagttaccggataaggcgcagcggtcgggctgaacggggggttcgtgcacacagcccagcttggagcgaacgacctacaccgaactgagatacctacagcgtgagctatgagaaagcgccacgcttcccgaagggagaaaggcggacaggtatccggtaagcggcagggtcggaacaggagagcgcacgagggagcttccagggggaaacgcctggtatctttatagtcctgtcgggtttcgccacctctgacttgagcgtcgatttttgtgatgctcgtcaggggggcggagcctatggaaaaacgccagcaacgcggcctttttacggttcctggccttttgctgg

SEQ ID NO: 382 - DNA, 7389 bp, Artificial
  Synthetic
agacttagggaccctgcggccgccattaattcctaatttttgttgacactctatcattgatagagttattttaccactccctatcagtgatagagaaaagtgaaatgaatagaccggccgctgagaaaaagcgaagcggcactgctctttaacaatttatcagacaatctgtgtgggcactcgaagatacggattcttaacgtcgcaagacgaaaaatgaataccaagtctcaagagtgaacacgtaattcattacgaagtttaattctttgagcgtcaaacttttagaagggagagtttgatcctggctcagaacgaacgctggcggcgtgcctaacacatgcaagtcgaacggactttaagacttcggttttaaagttagtggcgcacgggtgagtaacgcgtggatatctgcctatcagtgggggacaactacaggaaactgtagctaataccgcatacgctgtacgcaggaaagcgggggatcttcggacctcgcgctgatagatgagtccgcgtctgattagctagttggtggggtaaaggcctaccaaggcgatgatcagtaactggtttgagaggatgatcagtcacactggaactgagacacggtccagactcctacgggaggcagcagtggggaatattgcacaatgggggaaaccctgatgcagcgacgccgcgtgcgggaagaaggccttcgggttgtaaaccgctttcaattgggaagaagagatgagtactaatactgctctgatttgacggtacctttagaagaagcaccggctaatttcgtgccagcagccgcggtaatacgaaaggtgcaagcgttgttcggatttactgggcgtaaagagatcgtaggtggtttgttaagtcggatgtgaaatcccagggctcaaccctggaactgcattcgatactggcagactagagtttgggaggggtaagcggaattccgtgtgtagcagtgaaatgcgtagatatacggaggaacacctgaggcgaaggcggcttactggaccaatactgacactgaggatcgaaagcgtgggtagcaaacaggattagataccctggtagtccacgccctaaacgatgtcaactagccgtagcgggtatcgacccctgctgtggcgaagctaacgcgataagttgaccgcctggggagtacggtcgcaagattaaaactcaaaggaattgacgggggcccgcacaagcggtggagcatgtggtttaattcgacgcaacgcgaagaaccttacctgggtttgacatcctaagaatactttagagatagagtagtgccttcgggagcttagagacaggtgctgcatggctgtcgtcagctcgtgtcgtgagatgttgggttaagtcccgcaacgagcgcaacccctatcgttagttgccatcatttagttgggcactctagcgagactgccggtgacaaaccggaggaaggtggggacgacgtcaagtcatcatggcccttatgtccagggctacacacgtgctacaatggcgactacaacaagttgcgaacccgcgagggggagccaatcttataaaagtcgtctcagttcggattggagtctgcaactcgactccatgaagttggaatcgctagtaatcgcggatcagcatgccgcggtgaatacgttcccgggccttgtacacaccgcccgtcacaccatgggaattggttgcaccagaagccgccgggctaaccggtcaacagccgtttgagctaaccggtactaatgaaccgtgaggcttaaccttgagaggttaagcgactaagcgtacacggtggatgccctggcagtcagaggcgatgaaggacgtgctaatctgcgataagcgtcggtaaggtgatatgaaccgttataaccggcgatttccgaatggggaaacccagtgtgtttcgacacactatcattaactgaatccataggttaatgaggcgaaccgggggaactgaaacatctaagtaccccgaggaaaagaaatcaaccgagattcccccagtagcggcgagcgaacggggagcagcccagagcctgaatcagtgtgtgtgttagtggaagcgtctggaaaggcgcgcgatacagggtgacagccccgtacacaaaaatgcacatgctgtgagctcgatgagtagggcgggacacgtggtatcctgtctgaatatggggggaccatcctccaaggctaaatactcctgactgaccgatagtgaaccagtaccgtgagggaaaggcgaaaagaaccccggcgaggggagtgaaaaagaacctgaaaccgtgtacgtacaagcagtgggagcacgcttaggcgtgtgactgcgtaccttttgtataatgggtcagcgacttatattctgtagcaaggttaaccgaataggggagccgaagggaaaccgagtcttaactgggcgttaagttgcagggtatagacccgaaacccggtgatctagccatgggcaggttgaaggttgggtaacactaactggaggaccgaaccgactaatgttgaaaaattagcggatgacttgtggctgggggtgaaaggccaatcaaaccgggagatagctggttctccccgaaagctatttaggtagcgcctcgtgaattcatctccgggggtagagcactgtttcggcaagggggtcatcccgacttaccaacccgatgcaaactgcgaataccggagaatgttatcacgggagacacacggcgggtgctaacgtccgtcgtgaagagggaaacaacccagaccgccagctaaggtcccaaagtcatggttaagtgggaaacgatgtgggaaggcccagacagccaggatgttggcttagaagcagccatcatttaaagaaagcgtaatagctcactggtcgagtcggcctgcgcggaagatgtaacggggctaaaccatgcaccgaagctgcggcagcgacgcttatgcgttgttgggtaggggagcgttctgtaagcctgcgaaggtgtgctgtgaggcatgctggaggtatcagaagtgcgaatgctgacataagtaacgataaagcgggtgaaaagcccgctcgccggaagaccaagggttcctgtccaacgttaatcggggcagggtgagtcgacccctaaggcgaggccgaaaggcgtagtcgatgggaaacaggttaatattcctgtacttggtgttactgcgaaggggggacggagaaggctatgttggccgggcgacggttgtcccggtttaagcgtgtaggctggttttccaggcaaatccggaaaatcaaggctgaggcgtgatgacgaggcactacggtgctgaagcaacaaatgccctgcttccaggaaaagcctctaagcatcaggtaacatcaaatcgtaccccaaaccgacacaggtggtcaggtagagaataccaaggcgcttgagagaactcgggtgaaggaactaggcaaaatggtgccgtaacttcgggagaaggcacgctgatatgtaggtgaggtccctcgcggatggagctgaaatcagtcgaagataccagctggctgcaactgtttattaaaaacacagcactgtgcaaacacgaaagtggacgtatacggtgtgacgcctgcccggtgccggaaggttaattgatggggttagcgcaagcgaagctcttgatcgaagccccggtaaacggcggccgtaactataacggtcctaaggtagcgaaattccttgtcgggtaagttccgacctgcacgaatggcgtaatgatggccaggctgtctccacccgagactcagtgaaattgaactcgctgtgaagatgcagtgtacccgcggcaagacggaaagaccccgtgaacctttactatagcttgacactgaacattgagccttgatgtgtaggataggtgggaggctttgaagtgtggacgccagtctgcatggagccgaccttgaaataccaccctttaatgtttgatgttctaacgttgacccgtaatccgggttgcggacagtgtctggtgggtagtttgactggggcggtctcctcctaaagagtaacggaggagcacgaaggttggctaatcctggtcggacatcaggaggttagtgcaatggcataagccagcttgactgcgagcgtgacggcgcgagcaggtgcgaaagcaggtcatagtgatccggtggttctgaatggaagggccatcgctcaacggataaaaggtactccggggataacaggctgataccgcccaagagttcatatcgacggcggtgtttggcacctcgatgtcggctcatcacatcctggggctgaagtaggtcccaagggtatggctgttcgccatttaaagtggtacgcgagctgggtttagaacgtcgtgagacagttcggtccctatctgccgtgggcgctggagaactgaggggggctgctcctagtacgagaggaccggagtggacgcatcactggtgttcgggttgtcatgccaatggcactgcccggtagctaaatgcggaagagataagtgctgaaagcatctaagcacgaaacttgccccgagatgagttctccctgaccctttaagggtcctgaaggaacgttgaagacgacgacgttgataggccgggtgtgtaaacggacatggttttcgggaggcaggcgtctacggtgtggtcggtaactggggtgaagtcgtaacaaggtatccctaccggaaggtggggatggatcatgtggtttccttaaagaagcgtactttgtagtgctcacacagattgtctgatagaaagtgaaaagcaaggcgtttacgcgttgggagtgaggctgaagagaataaggccgttcgctttctattaatgaaagctcaccctacacgaaaatatcacgcaacgcgtgataagcaattttcgtgtccccttcgtctagaggcccaggacaccgccctttcacggcggtaacaggggttcgaatcccctaggggacgccacttgctggtttgtgagtgaaagtcgccgaccttaatatctcaaaactcatcttcgggtgatgtttgagatatttgctctttaaaaatctggatcaagctgaaaattgaaacactgaacaacgagagttgttcgtgagtctctcaaattttcgcaacacgatgatgaatcgaaaggcggatgagagaagattttcagcctgatacagattaaatcagaacgcagaagcggtctgataaaacagaatttgcctggcggcagtagcgcggtggtcccacctgaccccatgccgaactcagaagtgaaacgccgtagcgccgatggtagtgtggggtctccccatgcgagagtagggaactgccaggcatcaaataaaacgaaaggctcagtcgaaagactgggcctttcgttttatctgttgtttgtcggtgaacgctctcctgagtaggacaaatccgccgggagcggatttgaacgttgcgaagcaacggcccggagggtggcgggcaggacgcccgccataaactgccaggcatcaaattaagcagaaggccatcctgacggatggcctttttgcgtttctacaaactcttcctgtcgtcatatctacaagccggcgcgccgggaaatgtgcgcggaacccctatttgtttatttttctaaatacattcaaatatgtatccgctcatgagacaataaccctgataaatgcttcaataatattgaaaaaggaagagtatgagtattcaacatttccgtgtcgcccttattcccttttttgcggcattttgccttcctgtttttgctcacccagaaacgctggtgaaagtaaaagatgctgaagatcagttgggtgcacgagtgggttacatcgaactggatctcaacagcggtaagatccttgagagttttcgccccgaagaacgttttccaatgatgagcacttttaaagttctgctatgtggcgcggtattatcccgtgttgacgccgggcaagagcaactcggtcgccgcatacactattctcagaatgacttggttgagtactcaccagtcacagaaaagcatcttacggatggcatgacagtaagagaattatgcagtgctgcaataaccatgagtgataacactgcggccaacttacttctgacaacgatcggaggaccgaaggagctaaccgcttttttgcacaacatgggggatcatgtaactcgccttgatcgttgggaaccggagctgaatgaagccataccaaacgacgagcgtgacaccacgatgcctgcagcaatggcaacaacgttgcgcaaactattaactggcgaactacttactctagcttcccggcaacaattaatagactggatggaggcggataaagttgcaggaccacttctgcgctcggcccttccggctagctggtttattgctgataaatctggagccggtgagcgtgggtctcgcggtatcattgcagcactggggccagatggtaagccctcccgtatcgtagttatctacacgacggggagtcaggcaactatggatgaacgaaatagacagatcgctgagataggtgcctcactgattaagcattggtaactgcagaccaagtttactcatatatactttagattgatttaaaacttcatttttaatttaaaaggatctaggtgaagatcctttttgataatctcatgaccaaaatcccttaacgtgagttttcgttccactgagcgtcagaccccgtagaaaagatcaaaggatcttcttgagatcctttttttctgcgcgtaatctgctgcttgcaaacaaaaaaaccaccgctaccagcggtggtttgtttgccggatcaagagctaccaactctttttccgaaggtaactggcttcagcagagcgcagataccaaatactgtccttctagtgtagccgtagttaggccaccacttcaagaactctgtagcaccgcctacatacctcgctctgctaatcctgttaccagtggctgctgccagtggcgataagtcgtgtcttaccgggttggactcaagacgatagttaccggataaggcgcagcggtcgggctgaacggggggttcgtgcacacagcccagcttggagcgaacgacctacaccgaactgagatacctacagcgtgagctatgagaaagcgccacgcttcccgaagggagaaaggcggacaggtatccggtaagcggcagggtcggaacaggagagcgcacgagggagcttccagggggaaacgcctggtatctttatagtcctgtcgggtttcgccacctctgacttgagcgtcgatttttgtgatgctcgtcaggggggcggagcctatggaaaaacgccagcaacgcggcctttttacggttcctggccttttgctgg

SEQ ID NO: 383 - DNA, 7337 bp, Artificial
  Synthetic
agacttagggaccctgcggccgccattaattcctaatttttgttgacactctatcattgatagagttattttaccactccctatcagtgatagagaaaagtgaaatgaatagaccggccgctgagaaaaagcgaagcggcactgctctttaacaatttatcagacaatctgtgtgggcactcgaagatacggattcttaacgtcgcaagacgaaaaatgaataccaagtctcaagagtgaacacgtaattcattacgaagtttaattctttgagcgtcaaacttttcaacctgagagtttgatcctggctcagagcgaacgctggcggcaggcctaacacatgcaagtcgaacggatccttcgggattagtggcggacgggtgagtaacacgtgggaacgtgccctttggttcggaacaactcagggaaacttgagctaataccggatgtgcccttcgggggaaagatttatcgccattggagcggcccgcgtctgattagctagttggtgaggtaaaggctcaccaaggcgacgatcagtagctggtctgagaggatgatcagccacattgggactgagacacggcccaaactcctacgggaggcagcagtggggaatcttgcgcaatgggcgaaagcctgacgcagccatgccgcgtgaatgatgaaggtcttaggattgtaaaattctttcaccggggacgataatgacggtacccggagaagaagccccggctaacttcgtgccagcagccgcggtaatacgaagggggctagcgttgctcggaattactgggcgtaaagggagcgtaggcggactgtttagtcagaggtgaaagcccagggctcaaccttggaattgcctttgatactggcagtcttgagtacggaagaggtatgtggaactccgagtgtagaggtgaaattcgtagatattcggaagaacaccagtggcgaaggcgacatactggtccgttactgacgctgaggctcgaaagcgtggggagcaaacaggattagataccctggtagtccacgccgtaaacgatgagtgctagttgtcggcatgcatgcatgtcggtgacgcagctaacgcattaagcactccgcctggggagtacggtcgcaagattaaaactcaaaggaattgacgggggcccgcacaagcggtggagcatgtggtttaattcgaagcaacgcgcagaaccttaccaccttttgacatgcctggaccgccacagagatgtggttttcccttcggggactgggacacaggtgctgcatggctgtcgtcagctcgtgtcgtgagatgttgggttaagtcccgcaacgagcgcaaccctcgtgattagttgccatcaggtttggctgggcactctaatcatactgccggagttaatccggaggaaggcggggatgacgtcaagtcctcatggcccttacaaggtgggctacacacgtgctacaatggcgactacagagggctgcaatcccgcgagggggagccaatccctaaaagtcgtctcagttcggattgttctctgcaactcgagagcatgaagttggaatcgctagtaatcgcggatcagcatgccgcggtgaatacgttcccgggccttgtacacaccgcccgtcacaccatgggagttggctttacccgaaggcgctgcgctaaccggtcaacagccgtttgagctaaccggtactaatgaaccgtgaggcttaaccttgagaggttaagcgactaagcgtacacggtggatgccctggcagtcagaggcgatgaaggacgtgctaatctgcgataagcgtcggtaaggtgatatgaaccgttataaccggcgatttccgaatggggaaacccagtgtgtttcgacacactatcattaactgaatccataggttaatgaggcgaaccgggggaactgaaacatctaagtaccccgaggaaaagaaatcaaccgagattcccccagtagcggcgagcgaacggggagcagcccagagcctgaatcagtgtgtgtgttagtggaagcgtctggaaaggcgcgcgatacagggtgacagccccgtacacaaaaatgcacatgctgtgagctcgatgagtagggcgggacacgtggtatcctgtctgaatatggggggaccatcctccaaggctaaatactcctgactgaccgatagtgaaccagtaccgtgagggaaaggcgaaaagaaccccggcgaggggagtgaaaaagaacctgaaaccgtgtacgtacaagcagtgggagcacgcttaggcgtgtgactgcgtaccttttgtataatgggtcagcgacttatattctgtagcaaggttaaccgaataggggagccgaagggaaaccgagtcttaactgggcgttaagttgcagggtatagacccgaaacccggtgatctagccatgggcaggttgaaggttgggtaacactaactggaggaccgaaccgactaatgttgaaaaattagcggatgacttgtggctgggggtgaaaggccaatcaaaccgggagatagctggttctccccgaaagctatttaggtagcgcctcgtgaattcatctccgggggtagagcactgtttcggcaagggggtcatcccgacttaccaacccgatgcaaactgcgaataccggagaatgttatcacgggagacacacggcgggtgctaacgtccgtcgtgaagagggaaacaacccagaccgccagctaaggtcccaaagtcatggttaagtgggaaacgatgtgggaaggcccagacagccaggatgttggcttagaagcagccatcatttaaagaaagcgtaatagctcactggtcgagtcggcctgcgcggaagatgtaacggggctaaaccatgcaccgaagctgcggcagcgacgcttatgcgttgttgggtaggggagcgttctgtaagcctgcgaaggtgtgctgtgaggcatgctggaggtatcagaagtgcgaatgctgacataagtaacgataaagcgggtgaaaagcccgctcgccggaagaccaagggttcctgtccaacgttaatcggggcagggtgagtcgacccctaaggcgaggccgaaaggcgtagtcgatgggaaacaggttaatattcctgtacttggtgttactgcgaaggggggacggagaaggctatgttggccgggcgacggttgtcccggtttaagcgtgtaggctggttttccaggcaaatccggaaaatcaaggctgaggcgtgatgacgaggcactacggtgctgaagcaacaaatgccctgcttccaggaaaagcctctaagcatcaggtaacatcaaatcgtaccccaaaccgacacaggtggtcaggtagagaataccaaggcgcttgagagaactcgggtgaaggaactaggcaaaatggtgccgtaacttcgggagaaggcacgctgatatgtaggtgaggtccctcgcggatggagctgaaatcagtcgaagataccagctggctgcaactgtttattaaaaacacagcactgtgcaaacacgaaagtggacgtatacggtgtgacgcctgcccggtgccggaaggttaattgatggggttagcgcaagcgaagctcttgatcgaagccccggtaaacggcggccgtaactataacggtcctaaggtagcgaaattccttgtcgggtaagttccgacctgcacgaatggcgtaatgatggccaggctgtctccacccgagactcagtgaaattgaactcgctgtgaagatgcagtgtacccgcggcaagacggaaagaccccgtgaacctttactatagcttgacactgaacattgagccttgatgtgtaggataggtgggaggctttgaagtgtggacgccagtctgcatggagccgaccttgaaataccaccctttaatgtttgatgttctaacgttgacccgtaatccgggttgcggacagtgtctggtgggtagtttgactggggcggtctcctcctaaagagtaacggaggagcacgaaggttggctaatcctggtcggacatcaggaggttagtgcaatggcataagccagcttgactgcgagcgtgacggcgcgagcaggtgcgaaagcaggtcatagtgatccggtggttctgaatggaagggccatcgctcaacggataaaaggtactccggggataacaggctgataccgcccaagagttcatatcgacggcggtgtttggcacctcgatgtcggctcatcacatcctggggctgaagtaggtcccaagggtatggctgttcgccatttaaagtggtacgcgagctgggtttagaacgtcgtgagacagttcggtccctatctgccgtgggcgctggagaactgaggggggctgctcctagtacgagaggaccggagtggacgcatcactggtgttcgggttgtcatgccaatggcactgcccggtagctaaatgcggaagagataagtgctgaaagcatctaagcacgaaacttgccccgagatgagttctccctgaccctttaagggtcctgaaggaacgttgaagacgacgacgttgataggccgggtgtgtaaacggacatggttgcaagggggcaggcgaccacggtagggtcagcgactggggtgaagtcgtaacaaggtagccgtaggggaacctgcggctggatcatgtggtttccttaaagaagcgtactttgtagtgctcacacagattgtctgatagaaagtgaaaagcaaggcgtttacgcgttgggagtgaggctgaagagaataaggccgttcgctttctattaatgaaagctcaccctacacgaaaatatcacgcaacgcgtgataagcaattttcgtgtccccttcgtctagaggcccaggacaccgccctttcacggcggtaacaggggttcgaatcccctaggggacgccacttgctggtttgtgagtgaaagtcgccgaccttaatatctcaaaactcatcttcgggtgatgtttgagatatttgctctttaaaaatctggatcaagctgaaaattgaaacactgaacaacgagagttgttcgtgagtctctcaaattttcgcaacacgatgatgaatcgaaaggcggatgagagaagattttcagcctgatacagattaaatcagaacgcagaagcggtctgataaaacagaatttgcctggcggcagtagcgcggtggtcccacctgaccccatgccgaactcagaagtgaaacgccgtagcgccgatggtagtgtggggtctccccatgcgagagtagggaactgccaggcatcaaataaaacgaaaggctcagtcgaaagactgggcctttcgttttatctgttgtttgtcggtgaacgctctcctgagtaggacaaatccgccgggagcggatttgaacgttgcgaagcaacggcccggagggtggcgggcaggacgcccgccataaactgccaggcatcaaattaagcagaaggccatcctgacggatggcctttttgcgtttctacaaactcttcctgtcgtcatatctacaagccggcgcgccgggaaatgtgcgcggaacccctatttgtttatttttctaaatacattcaaatatgtatccgctcatgagacaataaccctgataaatgcttcaataatattgaaaaaggaagagtatgagtattcaacatttccgtgtcgcccttattcccttttttgcggcattttgccttcctgtttttgctcacccagaaacgctggtgaaagtaaaagatgctgaagatcagttgggtgcacgagtgggttacatcgaactggatctcaacagcggtaagatccttgagagttttcgccccgaagaacgttttccaatgatgagcacttttaaagttctgctatgtggcgcggtattatcccgtgttgacgccgggcaagagcaactcggtcgccgcatacactattctcagaatgacttggttgagtactcaccagtcacagaaaagcatcttacggatggcatgacagtaagagaattatgcagtgctgcaataaccatgagtgataacactgcggccaacttacttctgacaacgatcggaggaccgaaggagctaaccgcttttttgcacaacatgggggatcatgtaactcgccttgatcgttgggaaccggagctgaatgaagccataccaaacgacgagcgtgacaccacgatgcctgcagcaatggcaacaacgttgcgcaaactattaactggcgaactacttactctagcttcccggcaacaattaatagactggatggaggcggataaagttgcaggaccacttctgcgctcggcccttccggctagctggtttattgctgataaatctggagccggtgagcgtgggtctcgcggtatcattgcagcactggggccagatggtaagccctcccgtatcgtagttatctacacgacggggagtcaggcaactatggatgaacgaaatagacagatcgctgagataggtgcctcactgattaagcattggtaactgcagaccaagtttactcatatatactttagattgatttaaaacttcatttttaatttaaaaggatctaggtgaagatcctttttgataatctcatgaccaaaatcccttaacgtgagttttcgttccactgagcgtcagaccccgtagaaaagatcaaaggatcttcttgagatcctttttttctgcgcgtaatctgctgcttgcaaacaaaaaaaccaccgctaccagcggtggtttgtttgccggatcaagagctaccaactctttttccgaaggtaactggcttcagcagagcgcagataccaaatactgtccttctagtgtagccgtagttaggccaccacttcaagaactctgtagcaccgcctacatacctcgctctgctaatcctgttaccagtggctgctgccagtggcgataagtcgtgtcttaccgggttggactcaagacgatagttaccggataaggcgcagcggtcgggctgaacggggggttcgtgcacacagcccagcttggagcgaacgacctacaccgaactgagatacctacagcgtgagctatgagaaagcgccacgcttcccgaagggagaaaggcggacaggtatccggtaagcggcagggtcggaacaggagagcgcacgagggagcttccagggggaaacgcctggtatctttatagtcctgtcgggtttcgccacctctgacttgagcgtcgatttttgtgatgctcgtcaggggggcggagcctatggaaaaacgccagcaacgcggcctttttacggttcctggccttttgctgg

SEQ ID NO: 384 - DNA, 2947 bp, Artificial
  Synthetic
ttgagacacaacgtggctttccatcaaaaaaatattgacaacataaaaaactttgtgttatacttgtggaattgtgagcggataacaattctatatctgttattttttccaaccacagatctatgggcatttttagtatttttgtaatcagcacagttcattatcaaccaaacaaaaaattaagtggttataatgaatcgttaataagcaaaattcattataaccaaattagcaaaggtgaagaactgtttaccggcgttgtgccgattctggtggaactggatggcgatgtgaacggtcacaaattcagcgtgcgtggtgaaggtgaaggcgatgccacgattggcaaactgacgctgaaatttatctgcaccaccggcaaactgccggtgccgtggccgacgctggtgaccaccctgacctatggcgttcagtgttttagtcgctatccggatcacatgaaacgtcacgatttctttaaatctgcaatgccggaaggctatgtgcaggaacgtacgattagctttaaagatgatggcaaatataaaacgcgcgccgttgtgaaatttgaaggcgataccctggtgaaccgcattgaactgaaaggcacggattttaaagaagatggcaatatcctgggccataaactggaatacaactttaatagccataatgtttatattacggcggataaacagaaaaatggcatcaaagcgaattttaccgttcgccataacgttgaagatggcagtgtgcagctggcagatcattatcagcagaataccccgattggtgatggtccggtgctgctgccggataatcattatctgagcacgcagaccgttctgtctaaagatccgaacgaaaaaggcacgcgggaccacatggttctgcacgaatatgtgaatgcggcaggtattatgtggagccatccgcagttcgaaaaataagtcgaccggctgctaacaaagcccgcggccgctgaagatcgatctcgacgagtgagagaagattttcagcctgatacagattaaatcagaacgcagaagcggtctgataaaacagaatttgcctggcggcagtagcgcggtggtcccacctgaccccatgccgaactcagaagtgaaacgccgtagcgccgatggtagtgtggggtcaccccatgcgagagtagggaactgccaggcatcaaataaaacgaaaggctcagtcgaaagactgggcctttcgttttatctgttgtttgtcggtgaacgctctcctgagtaggacaaatccgccgggagcggatttgaacgttgcgaagcaacggcccggagggtggcgggcaggacgcccgccataaactgccaggcatcaaattaagcagaaggccatcctgacggatggcctttttgcgtttctacagagcgtcagaccccttaataagatgatcttcttgagatcgttttggtctgcgcgtaatctcttgctctgaaaacgaaaaaaccgccttgcagggcggtttttcgaaggttctctgagctaccaactctttgaaccgaggtaactggcttggaggagcgcagtcaccaaaacttgtcctttcagtttagccttaaccggcgcatgacttcaagactaactcctctaaatcaattaccagtggctgctgccagtggtgcttttgcatgtctttccgggttggactcaagacgatagttaccggataaggcgcagcggtcggactgaacggggggttcgtgcatacagtccagcttggagcgaactgcctacccggaactgagtgtcaggcgtggaatgagacaaacgcggccataacagcggaatgacaccggtaaaccgaaaggcaggaacaggagagcgcacgagggagccgccagggggaaacgcctggtatctttatagtcctgtcgggtttcgccaccactgatttgagcgtcagatttcgtgatgcttgtcaggggggcggagcctatggaaaaacggctcaagtcagcgtaatgctctgccagtgttacaaccaattaaccaattctgattagaaaaactcatcgagcatcaaatgaaactgcaatttattcatatcaggattatcaataccatatttttgaaaaagccgtttctgtaatgaaggagaaaactcaccgaggcagttccataggatggcaagatcctggtatcggtctgcgattccgactcgtccaacatcaatacaacctattaatttcccctcgtcaaaaataaggttatcaagtgagaaatcaccatgagtgacgactgaatccggtgagaatggcaaaagcttatgcatttctttccagacttgttcaacaggccagccattacgctcgtcatcaaaatcactcgcatcaaccaaaccgttattcattcgtgattgcgcctgagcgagacgaaatacgcgatcgctgttaaaaggacaattacaaacaggaatcgaatgcaaccggcgcaggaacactgccagcgcatcaacaatattttcacctgaatcaggatattcttctaatacctggaatgctgttttcccggggatcgcagtggtgagtaaccatgcatcatcaggagtacggataaaatgcttgatggtcggaagaggcataaattccgtcagccagtttagtctgaccatctcatctgtaacatcattggcaacgctacctttgccatgtttcagaaacaactctggcgcatcgggcttcccatacaatcgatagattgtcgcacctgattgcccgacattatcgcgagcccatttatacccatataaatcagcatccatgttggaatttaatcgcggcctcgagcaagacgtttcccgttgaatatggctcataacaccccttgtattactgtttatgtaagcagacagttttattgttcatgatgatatatttttatcttgtgcaatgtaacatcagagatt

SEQ ID NO: 385 - DNA, 7418 bp, Artificial
  Synthetic
agacttagggaccctgcggccgccattaattcctaatttttgttgacactctatcattgatagagttattttaccactccctatcagtgatagagaaaagtgaaatgaatagaccggccgctgagaaaaagcgaagcggcactgctctttaacaatttatcagacaatctgtgtgggcactcgaagatacggattcttaacgtcgcaagacgaaaaatgaataccaagtctcaagagtgaacacgtaattcattacgaagtttaattctttgagcgtcaaacttttaaattgaagagtttgatcatggctcagattgaacgctggcggcaggcctaacacatgcaagtcgaacggtaacaggaagaagcttgcttctttgctgacgagtggcggacgggtgagtaatgtctgggaaactgcctgatggagggggataactactggaaacggtagctaataccgcataacgtcgcaagaccaaagagggggaccttcgggcctcttgccatcggatgtgcccagatgggattagctagtaggtggggtaacggctcacctaggcgacgatccctagctggtctgagaggatgaccagccacactggaactgagacacggtccagactcctacgggaggcagcagtggggaatattgcacaatgggcgcaagcctgatgcagccatgccgcgtgtatgaagaaggccttcgggttgtaaagtactttcagcggggaggaagggagtaaagttaatacctttgctcattgacgttacccgcagaagaagcaccggctaactccgtgccagcagccgcggtaatacggagggtgcaagcgttaatcggaattactgggcgtaaagcgcacgcaggcggtttgttaagtcagatgtgaaatccccgggctcaacctgggaactgcatctgatactggcaagcttgagtctcgtagaggggggtagaattccaggtgtagcggtgaaatgcgtagagatctggaggaataccggtggcgaaggcggccccctggacgaagactgacgctcaggtgcgaaagcgtggggagcaaacaggattagataccctggtagtccacgccgtaaacgatgtcgacttggaggttgtgcccttgaggcgtggcttccggagctaacgcgttaagtcgaccgcctggggagtacggccgcaaggttaaaactcaaatgaattgacgggggcccgcacaagcggtggagcatgtggtttaattcgatgcaacgcgaagaaccttacctggtcttgacatccacggaagttttcagagatgagaatgtgccttcgggaaccgtgagacaggtgctgcatggctgtcgtcagctcgtgttgtgaaatgttgggttaagtcccgcaacgagcgcaacccttatcctttgttgccagcggtccggccgggaactcaaaggagactgccagtgataaactggaggaaggtggggatgacgtcaagtcatcatggcccttacgaccagggctacacacgtgctacaatggcgcatacaaagagaagcgacctcgcgagagcaagcggacctcataaagtgcgtcgtagtccggattggagtctgcaactcgactccatgaagtcggaatcgctagtaatcgtggatcagaatgccacggtgaatacgttcccgggccttgtacacaccgcccgtcacaccatgggagtgggttgcaaaagaagtaggtagcttaaccttcgggagggcgcttaccactttgtgattcatgactggggtgaagtcgtaacaaggtaaccgtaggggaacctgcggttggatcatgtggttaccttaaagaagcgtactttgtagtgctcacacagattgtctgatagaaagtgaaaagcaaggcgtttacgcgttgggagtgaggctgaagagaataaggccgttcgctttctattaatgaaagctcaccctacacgaaaatatcacgcaacgcgtgataagcaattttcgtgtccccttcgtctagaggcccaggacaccgccctttcacggcggtaacaggggttcgaatcccctaggggacgccacttgctggtttgtgagtgaaagtcgccgaccttaatatctcaaaactcatcttcgggtgatgtttgagatatttgctctttaaaaatctggatcaagctgaaaattgaaacactgaacaacgagagttgttcgtgagtctctcaaattttcgcaacacgatgatgaatcgaaagaaacatcttcgggttgtgaggttaagcgactaagcgtacacggtggatgccctggcagtcagaggcgatgaaggacgtgctaatctgcgataagcgtcggtaaggtgatatgaaccgttataaccggcgatttccgaatggggaaacccagtgtgtttcgacacactatcattaactgaatccataggttaatgaggcgaaccgggggaactgaaacatctaagtaccccgaggaaaagaaatcaaccgagattcccccagtagcggcgagcgaacggggagcagcccagagcctgaatcagtgtgtgtgttagtggaagcgtctggaaaggcgcgcgatacagggtgacagccccgtacacaaaaatgcacatgctgtgagctcgatgagtagggcgggacacgtggtatcctgtctgaatatggggggaccatcctccaaggctaaatactcctgactgaccgatagtgaaccagtaccgtgagggaaaggcgaaaagaaccccggcgaggggagtgaaaaagaacctgaaaccgtgtacgtacaagcagtgggagcacgcttaggcgtgtgactgcgtaccttttgtataatgggtcagcgacttatattctgtagcaaggttaaccgaataggggagccgaagggaaaccgagtcttaactgggcgttaagttgcagggtatagacccgaaacccggtgatctagccatgggcaggttgaaggttgggtaacactaactggaggaccgaaccgactaatgttgaaaaattagcggatgacttgtggctgggggtgaaaggccaatcaaaccgggagatagctggttctccccgaaagctatttaggtagcgcctcgtgaattcatctccgggggtagagcactgtttcggcaagggggtcatcccgacttaccaacccgatgcaaactgcgaataccggagaatgttatcacgggagacacacggcgggtgctaacgtccgtcgtgaagagggaaacaacccagaccgccagctaaggtcccaaagtcatggttaagtgggaaacgatgtgggaaggcccagacagccaggatgttggcttagaagcagccatcatttaaagaaagcgtaatagctcactggtcgagtcggcctgcgcggaagatgtaacggggctaaaccatgcaccgaagctgcggcagcgacgcttatgcgttgttgggtaggggagcgttctgtaagcctgcgaaggtgtgctgtgaggcatgctggaggtatcagaagtgcgaatgctgacataagtaacgataaagcgggtgaaaagcccgctcgccggaagaccaagggttcctgtccaacgttaatcggggcagggtgagtcgacccctaaggcgaggccgaaaggcgtagtcgatgggaaacaggttaatattcctgtacttggtgttactgcgaaggggggacggagaaggctatgttggccgggcgacggttgtcccggtttaagcgtgtaggctggttttccaggcaaatccggaaaatcaaggctgaggcgtgatgacgaggcactacggtgctgaagcaacaaatgccctgcttccaggaaaagcctctaagcatcaggtaacatcaaatcgtaccccaaaccgacacaggtggtcaggtagagaataccaaggcgcttgagagaactcgggtgaaggaactaggcaaaatggtgccgtaacttcgggagaaggcacgctgatatgtaggtgaggtccctcgcggatggagctgaaatcagtcgaagataccagctggctgcaactgtttattaaaaacacagcactgtgcaaacacgaaagtggacgtatacggtgtgacgcctgcccggtgccggaaggttaattgatggggttagcgcaagcgaagctcttgatcgaagccccggtaaacggcggccgtaactataacggtcctaaggtagcgaaattccttgtcgggtaagttccgacctgcacgaatggcgtaatgatggccaggctgtctccacccgagactcagtgaaattgaactcgctgtgaagatgcagtgtacccgcggcaagacggtaagaccccgtgaacctttactatagcttgacactgaacattgagccttgatgtgtaggataggtgggaggctttgaagtgtggacgccagtctgcatggagccgaccttgaaataccaccctttaatgtttgatgttctaacgttgacccgtaatccgggttgcggacagtgtctggtgggtagtttgactggggcggtctcctcctaaagagtaacggaggagcacgaaggttggctaatcctggtcggacatcaggaggttagtgcaatggcataagccagcttgactgcgagcgtgacggcgcgagcaggtgcgaaagcaggtcatagtgatccggtggttctgaatggaagggccatcgctcaacggataaaaggtactccggggataacaggctgataccgcccaagagttcatatcgacggcggtgtttggcacctcgatgtcggctcatcacatcctggggctgaagtaggtcccaagggtatggctgttcgccatttaaagtggtacgcgagctgggtttagaacgtcgtgagacagttcggtccctatctgccgtgggcgctggagaactgaggggggctgctcctagtacgagaggaccggagtggacgcatcactggtgttcgggttgtcatgccaatggcactgcccggtagctaaatgcggaagagataagtgctgaaagcatctaagcacgaaacttgccccgagatgagttctccctgaccctttaagggtcctgaaggaacgttgaagacgacgacgttgataggccgggtgtgtaagcgcagcgatgcgttgagctaaccggtactaatgaaccgtgaggcttaaccttacaacgccgaagctgttttggcggatgagagaagattttcagcctgatacagattaaatcagaacgcagaagcggtctgataaaacagaatttgcctggcggcagtagcgcggtggtcccacctgaccccatgccgaactcagaagtgaaacgccgtagcgccgatggtagtgtggggtctccccatgcgagagtagggaactgccaggcatcaaataaaacgaaaggctcagtcgaaagactgggcctttcgttttatctgttgtttgtcggtgaacgctctcctgagtaggacaaatccgccgggagcggatttgaacgttgcgaagcaacggcccggagggtggcgggcaggacgcccgccataaactgccaggcatcaaattaagcagaaggccatcctgacggatggcctttttgcgtttctacaaactcttcctgtcgtcatatctacaagccggcgcgccgggaaatgtgcgcggaacccctatttgtttatttttctaaatacattcaaatatgtatccgctcatgagacaataaccctgataaatgcttcaataatattgaaaaaggaagagtatgagtattcaacatttccgtgtcgcccttattcccttttttgcggcattttgccttcctgtttttgctcacccagaaacgctggtgaaagtaaaagatgctgaagatcagttgggtgcacgagtgggttacatcgaactggatctcaacagcggtaagatccttgagagttttcgccccgaagaacgttttccaatgatgagcacttttaaagttctgctatgtggcgcggtattatcccgtgttgacgccgggcaagagcaactcggtcgccgcatacactattctcagaatgacttggttgagtactcaccagtcacagaaaagcatcttacggatggcatgacagtaagagaattatgcagtgctgcaataaccatgagtgataacactgcggccaacttacttctgacaacgatcggaggaccgaaggagctaaccgcttttttgcacaacatgggggatcatgtaactcgccttgatcgttgggaaccggagctgaatgaagccataccaaacgacgagcgtgacaccacgatgcctgcagcaatggcaacaacgttgcgcaaactattaactggcgaactacttactctagcttcccggcaacaattaatagactggatggaggcggataaagttgcaggaccacttctgcgctcggcccttccggctagctggtttattgctgataaatctggagccggtgagcgtgggtctcgcggtatcattgcagcactggggccagatggtaagccctcccgtatcgtagttatctacacgacggggagtcaggcaactatggatgaacgaaatagacagatcgctgagataggtgcctcactgattaagcattggtaactgcagaccaagtttactcatatatactttagattgatttaaaacttcatttttaatttaaaaggatctaggtgaagatcctttttgataatctcatgaccaaaatcccttaacgtgagttttcgttccactgagcgtcagaccccgtagaaaagatcaaaggatcttcttgagatcctttttttctgcgcgtaatctgctgcttgcaaacaaaaaaaccaccgctaccagcggtggtttgtttgccggatcaagagctaccaactctttttccgaaggtaactggcttcagcagagcgcagataccaaatactgtccttctagtgtagccgtagttaggccaccacttcaagaactctgtagcaccgcctacatacctcgctctgctaatcctgttaccagtggctgctgccagtggcgataagtcgtgtcttaccgggttggactcaagacgatagttaccggataaggcgcagcggtcgggctgaacggggggttcgtgcacacagcccagcttggagcgaacgacctacaccgaactgagatacctacagcgtgagctatgagaaagcgccacgcttcccgaagggagaaaggcggacaggtatccggtaagcggcagggtcggaacaggagagcgcacgagggagcttccagggggaaacgcctggtatctttatagtcctgtcgggtttcgccacctctgacttgagcgtcgatttttgtgatgctcgtcaggggggcggagcctatggaaaaacgccagcaacgcggcctttttacggttcctggccttttgctgg

SEQ ID NO: 386 - DNA, 7391 bp, Artificial
  Synthetic
agacttagggaccctgcggccgccattaattcctaatttttgttgacactctatcattgatagagttattttaccactccctatcagtgatagagaaaagtgaaatgaatagaccggccgctgagaaaaagcgaagcggcactgctctttaacaatttatcagacaatctgtgtgggcactcgaagatacggattcttaacgtcgcaagacgaaaaatgaataccaagtctcaagagtgaacacgtaattcattacgaagtttaattctttgagcgtcaaacttttaaattgaagagtttgatcatggctcagattgaacgctggcggcaggcctaacacatgcaagtcgaacggtaacaggaagaagcttgcttctttgctgacgagtggcggacgggtgagtaatgtctgggaaactgcctgatggagggggataactactggaaacggtagctaataccgcataacgtcgcaagaccaaagagggggaccttcgggcctcttgccatcggatgtgcccagatgggattagctagtaggtggggtaacggctcacctaggcgacgatccctagctggtctgagaggatgaccagccacactggaactgagacacggtccagactcctacgggaggcagcagtggggaatattgcacaatgggcgcaagcctgatgcagccatgccgcgtgtatgaagaaggccttcgggttgtaaagtactttcagcggggaggaagggagtaaagttaatacctttgctcattgacgttacccgcagaagaagcaccggctaactccgtgccagcagccgcggtaatacggagggtgcaagcgttaatcggaattactgggcgtaaagcgcacgcaggcggtttgttaagtcagatgtgaaatccccgggctcaacctgggaactgcatctgatactggcaagcttgagtctcgtagaggggggtagaattccaggtgtagcggtgaaatgcgtagagatctggaggaataccggtggcgaaggcggccccctggacgaagactgacgctcaggtgcgaaagcgtggggagcaaacaggattagataccctggtagtccacgccgtaaacgatgtcgacttggaggttgtgcccttgaggcgtggcttccggagctaacgcgttaagtcgaccgcctggggagtacggccgcaaggttaaaactcaaatgaattgacgggggcccgcacaagcggtggagcatgtggtttaattcgatgcaacgcgaagaaccttacctggtcttgacatccacggaagttttcagagatgagaatgtgccttcgggaaccgtgagacaggtgctgcatggctgtcgtcagctcgtgttgtgaaatgttgggttaagtcccgcaacgagcgcaacccttatcctttgttgccagcggtccggccgggaactcaaaggagactgccagtgataaactggaggaaggtggggatgacgtcaagtcatcatggcccttacgaccagggctacacacgtgctacaatggcgcatacaaagagaagcgacctcgcgagagcaagcggacctcataaagtgcgtcgtagtccggattggagtctgcaactcgactccatgaagtcggaatcgctagtaatcgtggatcagaatgccacggtgaatacgttcccgggccttgtacacaccgcccgtcacaccatgggagtgggttgcaaaagaagtaggtagcttaaccggtcaacagccgtttgagctaaccggtactaatgaaccgtgaggcttaaccttgagaggttaagcgactaagcgtacacggtggatgccctggcagtcagaggcgatgaaggacgtgctaatctgcgataagcgtcggtaaggtgatatgaaccgttataaccggcgatttccgaatggggaaacccagtgtgtttcgacacactatcattaactgaatccataggttaatgaggcgaaccgggggaactgaaacatctaagtaccccgaggaaaagaaatcaaccgagattcccccagtagcggcgagcgaacggggagcagcccagagcctgaatcagtgtgtgtgttagtggaagcgtctggaaaggcgcgcgatacagggtgacagccccgtacacaaaaatgcacatgctgtgagctcgatgagtagggcgggacacgtggtatcctgtctgaatatggggggaccatcctccaaggctaaatactcctgactgaccgatagtgaaccagtaccgtgagggaaaggcgaaaagaaccccggcgaggggagtgaaaaagaacctgaaaccgtgtacgtacaagcagtgggagcacgcttaggcgtgtgactgcgtaccttttgtataatgggtcagcgacttatattctgtagcaaggttaaccgaataggggagccgaagggaaaccgagtcttaactgggcgttaagttgcagggtatagacccgaaacccggtgatctagccatgggcaggttgaaggttgggtaacactaactggaggaccgaaccgactaatgttgaaaaattagcggatgacttgtggctgggggtgaaaggccaatcaaaccgggagatagctggttctccccgaaagctatttaggtagcgcctcgtgaattcatctccgggggtagagcactgtttcggcaagggggtcatcccgacttaccaacccgatgcaaactgcgaataccggagaatgttatcacgggagacacacggcgggtgctaacgtccgtcgtgaagagggaaacaacccagaccgccagctaaggtcccaaagtcatggttaagtgggaaacgatgtgggaaggcccagacagccaggatgttggcttagaagcagccatcatttaaagaaagcgtaatagctcactggtcgagtcggcctgcgcggaagatgtaacggggctaaaccatgcaccgaagctgcggcagcgacgcttatgcgttgttgggtaggggagcgttctgtaagcctgcgaaggtgtgctgtgaggcatgctggaggtatcagaagtgcgaatgctgacataagtaacgataaagcgggtgaaaagcccgctcgccggaagaccaagggttcctgtccaacgttaatcggggcagggtgagtcgacccctaaggcgaggccgaaaggcgtagtcgatgggaaacaggttaatattcctgtacttggtgttactgcgaaggggggacggagaaggctatgttggccgggcgacggttgtcccggtttaagcgtgtaggctggttttccaggcaaatccggaaaatcaaggctgaggcgtgatgacgaggcactacggtgctgaagcaacaaatgccctgcttccaggaaaagcctctaagcatcaggtaacatcaaatcgtaccccaaaccgacacaggtggtcaggtagagaataccaaggcgcttgagagaactcgggtgaaggaactaggcaaaatggtgccgtaacttcgggagaaggcacgctgatatgtaggtgaggtccctcgcggatggagctgaaatcagtcgaagataccagctggctgcaactgtttattaaaaacacagcactgtgcaaacacgaaagtggacgtatacggtgtgacgcctgcccggtgccggaaggttaattgatggggttagcgcaagcgaagctcttgatcgaagccccggtaaacggcggccgtaactataacggtcctaaggtagcgaaattccttgtcgggtaagttccgacctgcacgaatggcgtaatgatggccaggctgtctccacccgagactcagtgaaattgaactcgctgtgaagatgcagtgtacccgcggcaagacggtaagaccccgtgaacctttactatagcttgacactgaacattgagccttgatgtgtaggataggtgggaggctttgaagtgtggacgccagtctgcatggagccgaccttgaaataccaccctttaatgtttgatgttctaacgttgacccgtaatccgggttgcggacagtgtctggtgggtagtttgactggggcggtctcctcctaaagagtaacggaggagcacgaaggttggctaatcctggtcggacatcaggaggttagtgcaatggcataagccagcttgactgcgagcgtgacggcgcgagcaggtgcgaaagcaggtcatagtgatccggtggttctgaatggaagggccatcgctcaacggataaaaggtactccggggataacaggctgataccgcccaagagttcatatcgacggcggtgtttggcacctcgatgtcggctcatcacatcctggggctgaagtaggtcccaagggtatggctgttcgccatttaaagtggtacgcgagctgggtttagaacgtcgtgagacagttcggtccctatctgccgtgggcgctggagaactgaggggggctgctcctagtacgagaggaccggagtggacgcatcactggtgttcgggttgtcatgccaatggcactgcccggtagctaaatgcggaagagataagtgctgaaagcatctaagcacgaaacttgccccgagatgagttctccctgaccctttaagggtcctgaaggaacgttgaagacgacgacgttgataggccgggtgtgtaaacggacatggttggagggcgcttaccactttgtgattcatgactggggtgaagtcgtaacaaggtaaccgtaggggaacctgcggttggatcatgtggttaccttaaagaagcgtactttgtagtgctcacacagattgtctgatagaaagtgaaaagcaaggcgtttacgcgttgggagtgaggctgaagagaataaggccgttcgctttctattaatgaaagctcaccctacacgaaaatatcacgcaacgcgtgataagcaattttcgtgtccccttcgtctagaggcccaggacaccgccctttcacggcggtaacaggggttcgaatcccctaggggacgccacttgctggtttgtgagtgaaagtcgccgaccttaatatctcaaaactcatcttcgggtgatgtttgagatatttgctctttaaaaatctggatcaagctgaaaattgaaacactgaacaacgagagttgttcgtgagtctctcaaattttcgcaacacgatgatgaatcgaaaggcggatgagagaagattttcagcctgatacagattaaatcagaacgcagaagcggtctgataaaacagaatttgcctggcggcagtagcgcggtggtcccacctgaccccatgccgaactcagaagtgaaacgccgtagcgccgatggtagtgtggggtctccccatgcgagagtagggaactgccaggcatcaaataaaacgaaaggctcagtcgaaagactgggcctttcgttttatctgttgtttgtcggtgaacgctctcctgagtaggacaaatccgccgggagcggatttgaacgttgcgaagcaacggcccggagggtggcgggcaggacgcccgccataaactgccaggcatcaaattaagcagaaggccatcctgacggatggcctttttgcgtttctacaaactcttcctgtcgtcatatctacaagccggcgcgccgggaaatgtgcgcggaacccctatttgtttatttttctaaatacattcaaatatgtatccgctcatgagacaataaccctgataaatgcttcaataatattgaaaaaggaagagtatgagtattcaacatttccgtgtcgcccttattcccttttttgcggcattttgccttcctgtttttgctcacccagaaacgctggtgaaagtaaaagatgctgaagatcagttgggtgcacgagtgggttacatcgaactggatctcaacagcggtaagatccttgagagttttcgccccgaagaacgttttccaatgatgagcacttttaaagttctgctatgtggcgcggtattatcccgtgttgacgccgggcaagagcaactcggtcgccgcatacactattctcagaatgacttggttgagtactcaccagtcacagaaaagcatcttacggatggcatgacagtaagagaattatgcagtgctgcaataaccatgagtgataacactgcggccaacttacttctgacaacgatcggaggaccgaaggagctaaccgcttttttgcacaacatgggggatcatgtaactcgccttgatcgttgggaaccggagctgaatgaagccataccaaacgacgagcgtgacaccacgatgcctgcagcaatggcaacaacgttgcgcaaactattaactggcgaactacttactctagcttcccggcaacaattaatagactggatggaggcggataaagttgcaggaccacttctgcgctcggcccttccggctagctggtttattgctgataaatctggagccggtgagcgtgggtctcgcggtatcattgcagcactggggccagatggtaagccctcccgtatcgtagttatctacacgacggggagtcaggcaactatggatgaacgaaatagacagatcgctgagataggtgcctcactgattaagcattggtaactgcagaccaagtttactcatatatactttagattgatttaaaacttcatttttaatttaaaaggatctaggtgaagatcctttttgataatctcatgaccaaaatcccttaacgtgagttttcgttccactgagcgtcagaccccgtagaaaagatcaaaggatcttcttgagatcctttttttctgcgcgtaatctgctgcttgcaaacaaaaaaaccaccgctaccagcggtggtttgtttgccggatcaagagctaccaactctttttccgaaggtaactggcttcagcagagcgcagataccaaatactgtccttctagtgtagccgtagttaggccaccacttcaagaactctgtagcaccgcctacatacctcgctctgctaatcctgttaccagtggctgctgccagtggcgataagtcgtgtcttaccgggttggactcaagacgatagttaccggataaggcgcagcggtcgggctgaacggggggttcgtgcacacagcccagcttggagcgaacgacctacaccgaactgagatacctacagcgtgagctatgagaaagcgccacgcttcccgaagggagaaaggcggacaggtatccggtaagcggcagggtcggaacaggagagcgcacgagggagcttccagggggaaacgcctggtatctttatagtcctgtcgggtttcgccacctctgacttgagcgtcgatttttgtgatgctcgtcaggggggcggagcctatggaaaaacgccagcaacgcggcctttttacggttcctggccttttgctgg

SEQ ID NO: 387 - DNA, 2905 bp, Artificial
  Synthetic
ggttaagcgactaagcgtacacggtggatgccctggcagtcagaggcgatgaaggacgtgctaatctgcgataagcgtcggtaaggtgatatgaaccgttataaccggcgatttccgaatggggaaacccagtgtgtttcgacacactatcattaactgaatccataggttaatgaggcgaaccgggggaactgaaacatctaagtaccccgaggaaaagaaatcaaccgagattcccccagtagcggcgagcgaacggggagcagcccagagcctgaatcagtgtgtgtgttagtggaagcgtctggaaaggcgtgcgatacagggtgacagccccgtacacaaaaatgcacatgctgtgagctcgatgagtagggcgggacacgtggtatcctgtctgaatatggggggaccatcctccaaggctaaatactcctgactgaccgatagtgaaccagtaccgtgagggaaaggcgaaaagaaccccggcgaggggagtgaaaaagaacctgaaaccgtgtacgtacaagcagtgggagcacgcttaggcgtgtgactgcgtaccttttgtataatgggtcagcgacttatattctgtagcaaggttaaccgaataggggagccgaagggaaaccgagtcttaactgggcgttaagttgcagggtatagacccgaaacccggtgatctagccatgggcaggttgaaggttgggtaacactaactggaggaccgaaccgactaatgttgaaaaattagcggatgacttgtggctgggggtgaaaggccaatcaaaccgggagatagctggttctccccgaaagctatttaggtagcgcctcgtgaattcatctccgggggtagagcactgtttcggcaagggggtcatcccgacttaccaacccgatgcaaactgcgaataccggagaatgttatcacgggagacacacggcgggtgctaacgtccgtcgtgaagagggaaacaacccagaccgccagctaaggtcccaaagtcatggttaagtgggaaacgatgtgggaaggcccagacagccaggatgttggcttagaagcagccatcatttaaagaaagcgtaatagctcactggtcgagtcggcctgcgcggaagatgtaacggggctaaaccatgcaccgaagctgcggcagcgacactatgtgttgttgggtaggggagcgttctgtaagcctgtgaaggtgtgctgtgaggcatgctggaggtatcagaagtgcgaatgctgacataagtaacgataaagcgggtgaaaagcccgctcgccggaagaccaagggttcctgtccaacgttaatcggggcagggtgagtcgacccctaaggcgaggccgaaaggcgtagtcgatgggaaacaggttaatattcctgtacttggtgttactgcgaaggggggacggagaaggctatgttggccgggcgacggttgtcccggtttaagcgtgtaggctggttttccaggcaaatccggaaaatcaaggctgaggcgtgatgacgaggcactacggtgctgaagcaacaaatgccctgcttccaggaaaagcctctaagcatcaggtaacatcaaatcgtaccccaaaccgacacaggtggtcaggtagagaataccaaggcgcttgagagaactcgggtgaaggaactaggcaaaatggtgccgtaacttcgggagaaggcacgctgatatgtaggtgaagcgacttgctcgtggagctgaaatcagtcgaagataccagctggctgcaactgtttattaaaaacacagcactgtgcaaacacgaaagtggacgtatacggtgtgacgcctgcccggtgccggaaggttaattgatggggttagccgcaaggcgaagctcttgatcgaagccccggtaaacggcggccgtaactataacggtcctaaggtagcgaaattccttgtcgggtaagttccgacctgcacgaatggcgtaatgatggccaggctgtctccacccgagactcagtgaaattgaactcgctgtgaagatgcagtgtacccgcggcaagacggaaagaccccgtgaacctttactatagcttgacactgaacattgagccttgatgtgtaggataggtgggaggctttgaagtgtggacgccagtctgcatggagccgaccttgaaataccaccctttaatgtttgatgttctaacgttgacccgtaatccgggttgcggacagtgtctggtgggtagtttgactggggcggtctcctcctaaagagtaacggaggagcacgaaggttggctaatcctggtcggacatcaggaggttagtgcaatggcataagccagcttgactgcgagcgtgacggcgcgagcaggtgcgaaagcaggtcatagtgatccggtggttctgaatggaagggccatcgctcaacggataaaaggtactccggggataacaggctgataccgcccaagagttcatatcgacggcggtgtttggcacctcgatgtcggctcatcacatcctggggctgaagtaggtcccaagggtatggctgttcgccatttaaagtggtacgcgagctgggtttagaacgtcgtgagacagttcggtccctatctgccgtgggcgctggagaactgaggggggctgctcctagtacgagaggaccggagtggacgcatcactggtgttcgggttgtcatgccaatggcactgcccggtagctaaatgcggaagagataagtgctgaaagcatctaagcacgaaacttgccccgagatgagttctccctgactccttgagagtcctgaaggaacgttgaagacgacgacgttgataggccgggtgtgtaagcgcagcgatgcgttgagctaaccggtactaatgaaccgtgaggcttaacctt

SEQ ID NO: 388 - DNA, 2905 bp, Artificial
  Synthetic
ggttaagcgactaagcgtacacggtggatgccctggcagtcagaggcgatgaaggacgtgctaatctgcgataagcgtcggtaaggtgatatgaaccgttataaccggcgatttccgaatggggaaacccagtgtgtttcgacacactatcattaactgaatccataggttaatgaggcgaaccgggggaactgaaacatctaagtaccccgaggaaaagaaatcaaccgagattcccccagtagcggcgagcgaacggggagcagcccagagcctgaatcagtgtgtgtgttagtggaagcgtctggaaaggcgtgcgatacagggtgacagccccgtacacaaaaatgcacatgctgtgagctcgatgagtagggcgggacacgtggtatcctgtctgaatatggggggaccatcctccaaggctaaatactcctgactgaccgatagtgaaccagtaccgtgagggaaaggcgaaaagaaccccggcgaggggagtgaaaaagaacctgaaaccgtgtacgtacaagcagtgggagcacgcttaggcgtgtgactgcgtaccttttgtataatgggtcagcgacttatattctgtagcaaggttaaccgaataggggagccgaagggaaaccgagtcttaactgggcgttaagttgcagggtatagacccgaaacccggtgatctagccatgggcaggttgaaggttgggtaacactaactggaggaccgaaccgactaatgttgaaaaattagcggatgacttgtggctgggggtgaaaggccaatcaaaccgggagatagctggttctccccgaaagctatttaggtagcgcctcgtgaattcatctccgggggtagagcactgtttcggcaagggggtcatcccgacttaccaacccgatgcaaactgcgaataccggagaatgttatcacgggagacacacggcgggtgctaacgtccgtcgtgaagagggaaacaacccagaccgccagctaaggtcccaaagtcatggttaagtgggaaacgatgtgggaaggcccagacagccaggatgttggcttagaagcagccatcatttaaagaaagcgtaatagctcactggtcgagtcggcctgcgcggaagatgtaacggggctaaaccatgcaccgaagctgcggcagcgacactatgtgttgttgggtaggggagcgttctgtaagcctgtgaaggtgtgctgtgaggcatgctggaggtatcagaagtgcgaatgctgacataagtaacgataaagcgggtgaaaagcccgctcgccggaagaccaagggttcctgtccaacgttaatcggggcagggtgagtcgacccctaaggcgaggccgaaaggcgtagtcgatgggaaacaggttaatattcctgtacttggtgttactgcgaaggggggacggagaaggctatgttggccgggcgacggttgtcccggtttaagcgtgtaggctggttttccaggcaaatccggaaaatcaaggctgaggcgtgatgacgaggcactacggtgctgaagcaacaaatgccctgcttccaggaaaagcctctaagcatcaggtaacatcaaatcgtaccccaaaccgacacaggtggtcaggtagagaataccaaggcgcttgagagaactcgggtgaaggaactaggcaaaatggtgccgtaacttcgggagaaggcacgctgatatgtaggtgaagcgacttgctcgtggagctgaaatcagtcgaagataccagctggctgcaactgtttattaaaaacacagcactgtgcaaacacgaaagtggacgtatacggtgtgacgcctgcccggtgccggaaggttaattgatggggttagccgcaaggcgaagctcttgatcgaagccccggtaaacggcggccgtaactataacggtcctaaggtagcgaaattccttgtcgggtaagttccgacctgcacgaatggcgtaatgatggccaggctgtctccacccgagactcagtgaaattgaactcgctgtgaagatgcagtgtacccgcggcaagacggtaagaccccgtgaacctttactatagcttgacactgaacattgagccttgatgtgtaggataggtgggaggctttgaagtgtggacgccagtctgcatggagccgaccttgaaataccaccctttaatgtttgatgttctaacgttgacccgtaatccgggttgcggacagtgtctggtgggtagtttgactggggcggtctcctcctaaagagtaacggaggagcacgaaggttggctaatcctggtcggacatcaggaggttagtgcaatggcataagccagcttgactgcgagcgtgacggcgcgagcaggtgcgaaagcaggtcatagtgatccggtggttctgaatggaagggccatcgctcaacggataaaaggtactccggggataacaggctgataccgcccaagagttcatatcgacggcggtgtttggcacctcgatgtcggctcatcacatcctggggctgaagtaggtcccaagggtatggctgttcgccatttaaagtggtacgcgagctgggtttagaacgtcgtgagacagttcggtccctatctgccgtgggcgctggagaactgaggggggctgctcctagtacgagaggaccggagtggacgcatcactggtgttcgggttgtcatgccaatggcactgcccggtagctaaatgcggaagagataagtgctgaaagcatctaagcacgaaacttgccccgagatgagttctccctgactccttgagagtcctgaaggaacgttgaagacgacgacgttgataggccgggtgtgtaagcgcagcgatgcgttgagctaaccggtactaatgaaccgtgaggcttaacctt

SEQ ID NO: 389 - DNA, 2904 bp, Artificial
  Synthetic
ggttaagcgactaagcgtacacggtggatgccctggcagtcagaggcgatgaaggacgtgctaatctgcgataagcgtcggtaaggtgatatgaaccgttataaccggcgatttccgaatggggaaacccagtgtgtttcgacacactatcattaactgaatccataggttaatgaggcgaaccgggggaactgaaacatctaagtaccccgaggaaaagaaatcaaccgagattcccccagtagcggcgagcgaacggggagcagcccagagcctgaatcagtgtgtgtgttagtggaagcgtctggaaaggcgcgcgatacagggtgacagccccgtacacaaaaatgcacatgctgtgagctcgatgagtagggcgggacacgtggtatcctgtctgaatatggggggaccatcctccaaggctaaatactcctgactgaccgatagtgaaccagtaccgtgagggaaaggcgaaaagaaccccggcgaggggagtgaaaaagaacctgaaaccgtgtacgtacaagcagtgggagcacgcttaggcgtgtgactgcgtaccttttgtataatgggtcagcgacttatattctgtagcaaggttaaccgaataggggagccgaagggaaaccgagtcttaactgggcgttaagttgcagggtatagacccgaaacccggtgatctagccatgggcaggttgaaggttgggtaacactaactggaggaccgaaccgactaatgttgaaaaattagcggatgacttgtggctgggggtgaaaggccaatcaaaccgggagatagctggttctccccgaaagctatttaggtagcgcctcgtgaattcatctccgggggtagagcactgtttcggcaagggggtcatcccgacttaccaacccgatgcaaactgcgaataccggagaatgttatcacgggagacacacggcgggtgctaacgtccgtcgtgaagagggaaacaacccagaccgccagctaaggtcccaaagtcatggttaagtgggaaacgatgtgggaaggcccagacagccaggatgttggcttagaagcagccatcatttaaagaaagcgtaatagctcactggtcgagtcggcctgcgcggaagatgtaacggggctaaaccatgcaccgaagctgcggcagcgacgcttatgcgttgttgggtaggggagcgttctgtaagcctgcgaaggtgtgctgtgaggcatgctggaggtatcagaagtgcgaatgctgacataagtaacgataaagcgggtgaaaagcccgctcgccggaagaccaagggttcctgtccaacgttaatcggggcagggtgagtcgacccctaaggcgaggccgaaaggcgtagtcgatgggaaacaggttaatattcctgtacttggtgttactgcgaaggggggacggagaaggctatgttggccgggcgacggttgtcccggtttaagcgtgtaggctggttttccaggcaaatccggaaaatcaaggctgaggcgtgatgacgaggcactacggtgctgaagcaacaaatgccctgcttccaggaaaagcctctaagcatcaggtaacatcaaatcgtaccccaaaccgacacaggtggtcaggtagagaataccaaggcgcttgagagaactcgggtgaaggaactaggcaaaatggtgccgtaacttcgggagaaggcacgctgatatgtaggtgaggtccctcgcggatggagctgaaatcagtcgaagataccagctggctgcaactgtttattaaaaacacagcactgtgcaaacacgaaagtggacgtatacggtgtgacgcctgcccggtgccggaaggttaattgatggggttagcgcaagcgaagctcttgatcgaagccccggtaaacggcggccgtaactataacggtcctaaggtagcgaaattccttgtcgggtaagttccgacctgcacgaatggcgtaatgatggccaggctgtctccacccgagactcagtgaaattgaactcgctgtgaagatgcagtgtacccgcggcaagacggaaagaccccgtgaacctttactatagcttgacactgaacattgagccttgatgtgtaggataggtgggaggctttgaagtgtggacgccagtctgcatggagccgaccttgaaataccaccctttaatgtttgatgttctaacgttgacccgtaatccgggttgcggacagtgtctggtgggtagtttgactggggcggtctcctcctaaagagtaacggaggagcacgaaggttggctaatcctggtcggacatcaggaggttagtgcaatggcataagccagcttgactgcgagcgtgacggcgcgagcaggtgcgaaagcaggtcatagtgatccggtggttctgaatggaagggccatcgctcaacggataaaaggtactccggggataacaggctgataccgcccaagagttcatatcgacggcggtgtttggcacctcgatgtcggctcatcacatcctggggctgaagtaggtcccaagggtatggctgttcgccatttaaagtggtacgcgagctgggtttagaacgtcgtgagacagttcggtccctatctgccgtgggcgctggagaactgaggggggctgctcctagtacgagaggaccggagtggacgcatcactggtgttcgggttgtcatgccaatggcactgcccggtagctaaatgcggaagagataagtgctgaaagcatctaagcacgaaacttgccccgagatgagttctccctgaccctttaagggtcctgaaggaacgttgaagacgacgacgttgataggccgggtgtgtaagcgcagcgatgcgttgagctaaccggtactaatgaaccgtgaggcttaacctt

SEQ ID NO: 390 - DNA, 2904 bp, Artificial
  Synthetic
ggttaagcgactaagcgtacacggtggatgccctggcagtcagaggcgatgaaggacgtgctaatctgcgataagcgtcggtaaggtgatatgaaccgttataaccggcgatttccgaatggggaaacccagtgtgtttcgacacactatcattaactgaatccataggttaatgaggcgaaccgggggaactgaaacatctaagtaccccgaggaaaagaaatcaaccgagattcccccagtagcggcgagcgaacggggagcagcccagagcctgaatcagtgtgtgtgttagtggaagcgtctggaaaggcgcgcgatacagggtgacagccccgtacacaaaaatgcacatgctgtgagctcgatgagtagggcgggacacgtggtatcctgtctgaatatggggggaccatcctccaaggctaaatactcctgactgaccgatagtgaaccagtaccgtgagggaaaggcgaaaagaaccccggcgaggggagtgaaaaagaacctgaaaccgtgtacgtacaagcagtgggagcacgcttaggcgtgtgactgcgtaccttttgtataatgggtcagcgacttatattctgtagcaaggttaaccgaataggggagccgaagggaaaccgagtcttaactgggcgttaagttgcagggtatagacccgaaacccggtgatctagccatgggcaggttgaaggttgggtaacactaactggaggaccgaaccgactaatgttgaaaaattagcggatgacttgtggctgggggtgaaaggccaatcaaaccgggagatagctggttctccccgaaagctatttaggtagcgcctcgtgaattcatctccgggggtagagcactgtttcggcaagggggtcatcccgacttaccaacccgatgcaaactgcgaataccggagaatgttatcacgggagacacacggcgggtgctaacgtccgtcgtgaagagggaaacaacccagaccgccagctaaggtcccaaagtcatggttaagtgggaaacgatgtgggaaggcccagacagccaggatgttggcttagaagcagccatcatttaaagaaagcgtaatagctcactggtcgagtcggcctgcgcggaagatgtaacggggctaaaccatgcaccgaagctgcggcagcgacgcttatgcgttgttgggtaggggagcgttctgtaagcctgcgaaggtgtgctgtgaggcatgctggaggtatcagaagtgcgaatgctgacataagtaacgataaagcgggtgaaaagcccgctcgccggaagaccaagggttcctgtccaacgttaatcggggcagggtgagtcgacccctaaggcgaggccgaaaggcgtagtcgatgggaaacaggttaatattcctgtacttggtgttactgcgaaggggggacggagaaggctatgttggccgggcgacggttgtcccggtttaagcgtgtaggctggttttccaggcaaatccggaaaatcaaggctgaggcgtgatgacgaggcactacggtgctgaagcaacaaatgccctgcttccaggaaaagcctctaagcatcaggtaacatcaaatcgtaccccaaaccgacacaggtggtcaggtagagaataccaaggcgcttgagagaactcgggtgaaggaactaggcaaaatggtgccgtaacttcgggagaaggcacgctgatatgtaggtgaggtccctcgcggatggagctgaaatcagtcgaagataccagctggctgcaactgtttattaaaaacacagcactgtgcaaacacgaaagtggacgtatacggtgtgacgcctgcccggtgccggaaggttaattgatggggttagcgcaagcgaagctcttgatcgaagccccggtaaacggcggccgtaactataacggtcctaaggtagcgaaattccttgtcgggtaagttccgacctgcacgaatggcgtaatgatggccaggctgtctccacccgagactcagtgaaattgaactcgctgtgaagatgcagtgtacccgcggcaagacggtaagaccccgtgaacctttactatagcttgacactgaacattgagccttgatgtgtaggataggtgggaggctttgaagtgtggacgccagtctgcatggagccgaccttgaaataccaccctttaatgtttgatgttctaacgttgacccgtaatccgggttgcggacagtgtctggtgggtagtttgactggggcggtctcctcctaaagagtaacggaggagcacgaaggttggctaatcctggtcggacatcaggaggttagtgcaatggcataagccagcttgactgcgagcgtgacggcgcgagcaggtgcgaaagcaggtcatagtgatccggtggttctgaatggaagggccatcgctcaacggataaaaggtactccggggataacaggctgataccgcccaagagttcatatcgacggcggtgtttggcacctcgatgtcggctcatcacatcctggggctgaagtaggtcccaagggtatggctgttcgccatttaaagtggtacgcgagctgggtttagaacgtcgtgagacagttcggtccctatctgccgtgggcgctggagaactgaggggggctgctcctagtacgagaggaccggagtggacgcatcactggtgttcgggttgtcatgccaatggcactgcccggtagctaaatgcggaagagataagtgctgaaagcatctaagcacgaaacttgccccgagatgagttctccctgaccctttaagggtcctgaaggaacgttgaagacgacgacgttgataggccgggtgtgtaagcgcagcgatgcgttgagctaaccggtactaatgaaccgtgaggcttaacctt

SEQ ID NO: 391 - DNA, 2904 bp, Artificial
  Synthetic
ggttaagcgactaagcgtacacggtggatgccctggcagtcagaggcgatgaaggacgtgctaatctgcgataagcgtcggtaaggtgatatgaaccgttataaccggcgatttccgaatggggaaacccagtgtgtttcgacacactatcattaactgaatccataggttaatgaggcgaaccgggggaactgaaacatctaagtaccccgaggaaaagaaatcaaccgagattcccccagtagcggcgagcgaacggggagcagcccagagcctgaatcagtatgtgtgttagtggaagcgtctggaaaggcgcgcgatacagggtgacagccccgtacacaaaaatgcacatattgtgagctcgatgagtagggcgggacacgtggtatcctgtctgaatatggggggaccatcctccaaggctaaatactcctgactgaccgatagtgaaccagtaccgtgagggaaaggcgaaaagaaccccggcgaggggagtgaaaaagaacctgaaaccgtgtacgtacaagcagtgggagcacgcttaggcgtgtgactgcgtaccttttgtataatgggtcagcgacttatattctgtagcaaggttaaccgaataggggagccgaagggaaaccgagtcttaactgggcgttaagttgcagggtatagacccgaaacccggtgatctagccatgggcaggttgaaggttgggtaacactaactggaggaccgaaccgactaatgttgaaaaattagcggatgacttgtggctgggggtgaaaggccaatcaaaccgggagatagctggttctccccgaaagctatttaggtagcgcctcgtgaattcatctccgggggtagagcactgtttcggcaagggggtcatcccgacttaccaacccgatgcaaactgcgaataccggagaatgttatcacgggagacacacggcgggtgctaacgtccgtcgtgaagagggaaacaacccagaccgccagctaaggtcccaaagtcatggttaagtgggaaacgatgtgggaaggcccagacagccaggatgttggcttagaagcagccatcatttaaagaaagcgtaatagctcactggtcgagtcggcctgcgcggaagatgtaacggggctaaaccatgcaccgaagctgcggcagcgacgcttatgcgttgttgggtaggggagcgttctgtaagcctgcgaaggtgtgctgtgaggcatgctggaggtatcagaagtgcgaatgctgacataagtaacgataaagcgggtgaaaagcccgctcgccggaagaccaagggttcctgtccaacgttaatcggggcagggtgagtcgacccctaaggcgaggccgaaaggcgtagtcgatgggaaacaggttaatattcctgtacttggtgttactgcgaaggggggacggagaaggctatgttggccgggcgacggttgtcccggtttaagcgtgtaggctggttttccaggcaaatccggaaaatcaaggctgaggcgtgatgacgaggcactacggtgctgaagcaacaaatgccctgcttccaggaaaagcctctaagcatcaggtaacatcaaatcgtaccccaaaccgacacaggtggtcaggtagagaataccaaggcgcttgagagaactcgggtgaaggaactaggcaaaatggtgccgtaacttcgggagaaggcacgctgatatgtaggtgaagcgacttgctcgtggagctgaaatcagtcgaagataccagctggctgcaactgtttattaaaaacacagcactgtgcaaacacgaaagtggacgtatacggtgtgacgcctgcccggtgccggaaggttaattgatggggtcagcgcaagcgaagctcttgatcgaagccccggtaaacggcggccgtaactataacggtcctaaggtagcgaaattccttgtcgggtaagttccgacctgcacgaatggcgtaatgatggccaggctgtctccacccgagactcagtgaaattgaactcgctgtgaagatgcagtgtacccgcggcaagacggaaagaccccgtgaacctttactatagcttgacactgaacattgagccttgatgtgtaggataggtgggaggctttgaagtgtggacgccagtctgcatggagccgaccttgaaataccaccctttaatgtttgatgttctaacgtggacccgtgatccgggttgcggacagtgtctggtgggtagtttgactggggcggtctcctcctaaagagtaacggaggagcacgaaggttggctaatcctggtcggacatcaggaggttagtgcaatggcataagccagcttgactgcgagcgtgacggcgcgagcaggtgcgaaagcaggtcatagtgatccggtggttctgaatggaagggccatcgctcaacggataaaaggtactccggggataacaggctgataccgcccaagagttcatatcgacggcggtgtttggcacctcgatgtcggctcatcacatcctggagctgaagtaggtcccaagggtatggctgttcgccatttaaagtggtacgcgagctgggtttagaacgtcgtgagacagttcggtccctatctgccgtgggcgctggagaactgaggggggctgctcctagtacgagaggaccggagtggacgcatcactggtgttcgggttgtcatgccaatggcactgcccggtagctaaatgcggaagagataagtgctgaaagcatctaagcacgaaacttgccccgagatgagttctccctgactccttgagagtcctgaaggaacgttgaagacgacgacgttgataggccgggtgtgtaagcgcagcgatgcgttgagctaaccggtactaatgaaccgtgaggcttaacctt

SEQ ID NO: 392 - DNA, 2904 bp, Artificial
  Synthetic
ggttaagcgactaagcgtacacggtggatgccctggcagtcagaggcgatgaaggacgtgctaatctgcgataagcgtcggtaaggtgatatgaaccgttataaccggcgatttccgaatggggaaacccagtgtgtttcgacacactatcattaactgaatccataggttaatgaggcgaaccgggggaactgaaacatctaagtaccccgaggaaaagaaatcaaccgagattcccccagtagcggcgagcgaacggggagcagcccagagcctgaatcagtatgtgtgttagtggaagcgtctggaaaggcgcgcgatacagggtgacagccccgtacacaaaaatgcacatattgtgagctcgatgagtagggcgggacacgtggtatcctgtctgaatatggggggaccatcctccaaggctaaatactcctgactgaccgatagtgaaccagtaccgtgagggaaaggcgaaaagaaccccggcgaggggagtgaaaaagaacctgaaaccgtgtacgtacaagcagtgggagcacgcttaggcgtgtgactgcgtaccttttgtataatgggtcagcgacttatattctgtagcaaggttaaccgaataggggagccgaagggaaaccgagtcttaactgggcgttaagttgcagggtatagacccgaaacccggtgatctagccatgggcaggttgaaggttgggtaacactaactggaggaccgaaccgactaatgttgaaaaattagcggatgacttgtggctgggggtgaaaggccaatcaaaccgggagatagctggttctccccgaaagctatttaggtagcgcctcgtgaattcatctccgggggtagagcactgtttcggcaagggggtcatcccgacttaccaacccgatgcaaactgcgaataccggagaatgttatcacgggagacacacggcgggtgctaacgtccgtcgtgaagagggaaacaacccagaccgccagctaaggtcccaaagtcatggttaagtgggaaacgatgtgggaaggcccagacagccaggatgttggcttagaagcagccatcatttaaagaaagcgtaatagctcactggtcgagtcggcctgcgcggaagatgtaacggggctaaaccatgcaccgaagctgcggcagcgacgcttatgcgttgttgggtaggggagcgttctgtaagcctgcgaaggtgtgctgtgaggcatgctggaggtatcagaagtgcgaatgctgacataagtaacgataaagcgggtgaaaagcccgctcgccggaagaccaagggttcctgtccaacgttaatcggggcagggtgagtcgacccctaaggcgaggccgaaaggcgtagtcgatgggaaacaggttaatattcctgtacttggtgttactgcgaaggggggacggagaaggctatgttggccgggcgacggttgtcccggtttaagcgtgtaggctggttttccaggcaaatccggaaaatcaaggctgaggcgtgatgacgaggcactacggtgctgaagcaacaaatgccctgcttccaggaaaagcctctaagcatcaggtaacatcaaatcgtaccccaaaccgacacaggtggtcaggtagagaataccaaggcgcttgagagaactcgggtgaaggaactaggcaaaatggtgccgtaacttcgggagaaggcacgctgatatgtaggtgaagcgacttgctcgtggagctgaaatcagtcgaagataccagctggctgcaactgtttattaaaaacacagcactgtgcaaacacgaaagtggacgtatacggtgtgacgcctgcccggtgccggaaggttaattgatggggtcagcgcaagcgaagctcttgatcgaagccccggtaaacggcggccgtaactataacggtcctaaggtagcgaaattccttgtcgggtaagttccgacctgcacgaatggcgtaatgatggccaggctgtctccacccgagactcagtgaaattgaactcgctgtgaagatgcagtgtacccgcggcaagacggtaagaccccgtgaacctttactatagcttgacactgaacattgagccttgatgtgtaggataggtgggaggctttgaagtgtggacgccagtctgcatggagccgaccttgaaataccaccctttaatgtttgatgttctaacgtggacccgtgatccgggttgcggacagtgtctggtgggtagtttgactggggcggtctcctcctaaagagtaacggaggagcacgaaggttggctaatcctggtcggacatcaggaggttagtgcaatggcataagccagcttgactgcgagcgtgacggcgcgagcaggtgcgaaagcaggtcatagtgatccggtggttctgaatggaagggccatcgctcaacggataaaaggtactccggggataacaggctgataccgcccaagagttcatatcgacggcggtgtttggcacctcgatgtcggctcatcacatcctggagctgaagtaggtcccaagggtatggctgttcgccatttaaagtggtacgcgagctgggtttagaacgtcgtgagacagttcggtccctatctgccgtgggcgctggagaactgaggggggctgctcctagtacgagaggaccggagtggacgcatcactggtgttcgggttgtcatgccaatggcactgcccggtagctaaatgcggaagagataagtgctgaaagcatctaagcacgaaacttgccccgagatgagttctccctgactccttgagagtcctgaaggaacgttgaagacgacgacgttgataggccgggtgtgtaagcgcagcgatgcgttgagctaaccggtactaatgaaccgtgaggcttaacctt

SEQ ID NO: 393 - DNA, 2904 bp, Artificial
  Synthetic
ggttaagcgactaagcgtacacggtggatgccctggcagtcagaggcgatgaaggacgtgctaatctgcgataagcgtcggtaaggtgatatgaaccgttataaccggcgatttccgaatggggaaacccagtgtgtttcgacacactatcattaactgaatccataggttaatgaggcgaaccgggggaactgaaacatctaagtaccccgaggaaaagaaatcaaccgagattcccccagtagcggcgagcgaacggggagcagcccagagcctgaatcagtgtgtgtgttagtggaagcgtctggaaaggcgcgcgatacagggtgacagccccgtacacaaaaatgcacatgctgtgagctcgatgagtagggcgggacacgtggtatcctgtctgaatatggggggaccatcctccaaggctaaatactcctgactgaccgatagtgaaccagtaccgtgagggaaaggcgaaaagaaccccggcgaggggagtgaaaaagaacctgaaaccgtgtacgtacaagcagtgggagcacgcttaggcgtgtgactgcgtaccttttgtataatgggtcagcgacttatattctgtagcaaggttaaccgaataggggagccgaagggaaaccgagtcttaactgggcgttaagttgcagggtatagacccgaaacccggtgatctagccatgggcaggttgaaggttgggtaacactaactggaggaccgaaccgactaatgttgaaaaattagcggatgacttgtggctgggggtgaaaggccaatcaaaccgggagatagctggttctccccgaaagctatttaggtagcgcctcgtgaattcatctccgggggtagagcactgtttcggcaagggggtcatcccgacttaccaacccgatgcaaactgcgaataccggagaatgttatcacgggagacacacggcgggtgctaacgtccgtcgtgaagagggaaacaacccagaccgccagctaaggtcccaaagtcatggttaagtgggaaacgatgtgggaaggcccagacagccaggatgttggcttagaagcagccatcatttaaagaaagcgtaatagctcactggtcgagtcggcctgcgcggaagatgtaacggggctaaaccatgcaccgaagctgcggcagcgacgcttatgcgttgttgggtaggggagcgttctgtaagcctgcgaaggtgtgctgtgaggcatgctggaggtatcagaagtgcgaatgctgacataagtaacgataaagcgggtgaaaagcccgctcgccggaagaccaagggttcctgtccaacgttaatcggggcagggtgagtcgacccctaaggcgaggccgaaaggcgtagtcgatgggaaacaggttaatattcctgtacttggtgttactgcgaaggggggacggagaaggctatgttggccgggcgacggttgtcccggtttaagcgtgtaggctggttttccaggcaaatccggaaaatcaaggctgaggcgtgatgacgaggcactacggtgctgaagcaacaaatgccctgcttccaggaaaagcctctaagcatcaggtaacatcaaatcgtaccccaaaccgacacaggtggtcaggtagagaataccaaggcgcttgagagaactcgggtgaaggaactaggcaaaatggtgccgtaacttcgggagaaggcacgctgatatgtaggtgaagcgacttgctcgtggagctgaaatcagtcgaagataccagctggctgcaactgtttattaaaaacacagcactgtgcaaacacgaaagtggacgtatacggtgtgacgcctgcccggtgccggaaggttaattgatggggttagcgcaagcgaagctcttgatcgaagccccggtaaacggcggccgtaactataacggtcctaaggtagcgaaattccttgtcgggtaagttccgacctgcacgaatggcgtaatgatggccaggctgtctccacccgagactcagtgaaattgaactcgctgtgaagatgcagtgtacccgcggcaagacggaaagaccccgtgaacctttactatagcttgacactgaacattgagccttgatgtgtaggataggtgggaggcttagaagtgtggacgccagtctgcatggagccgaccttgaaataccaccctttaatgtttgatgttctaacgttgacccgtaatccgggttgcggacagtgtctggtgggtagtttgactggggcggtctcctcctaaagagtaacggaggagcacgaaggttggctaatcctggtcggacatcaggaggttagtgcaatggcataagccagcttgactgcgagcgtgacggcgcgagcaggtgcgaaagcaggtcatagtgatccggtggttctgaatggaagggccatcgctcaacggataaaaggtactccggggataacaggctgataccgcccaagagttcatatcgacggcggtgtttggcacctcgatgtcggctcatcacatcctggggctgaagtaggtcccaagggtgatgctgttcgccatttaaagtggtacgcgagctgggtttagaacgtcgtgagacagttcggtccctatctgccgtgggcgctggagaactgaggggggctgctcctagtacgagaggaccggagtggacgcatcactggtgttcgggttgtcatgccaatggcactgcccggtagctaaatgcggaagagataagtgctgaaagcatctaagcacgaaacttgccccgagatgagttctccctgaccctttaagggtcctgaaggaacgttgaagacgacgacgttgataggccgggtgtgtaagcgcagcgatgcgttgagctaaccggtactaatgaaccgtgaggcttaacctt

SEQ ID NO: 394 - DNA, 2904 bp, Artificial
  Synthetic
ggttaagcgactaagcgtacacggtggatgccctggcagtcagaggcgatgaaggacgtgctaatctgcgataagcgtcggtaaggtgatatgaaccgttataaccggcgatttccgaatggggaaacccagtgtgtttcgacacactatcattaactgaatccataggttaatgaggcgaaccgggggaactgaaacatctaagtaccccgaggaaaagaaatcaaccgagattcccccagtagcggcgagcgaacggggagcagcccagagcctgaatcagtgtgtgtgttagtggaagcgtctggaaaggcgcgcgatacagggtgacagccccgtacacaaaaatgcacatgctgtgagctcgatgagtagggcgggacacgtggtatcctgtctgaatatggggggaccatcctccaaggctaaatactcctgactgaccgatagtgaaccagtaccgtgagggaaaggcgaaaagaaccccggcgaggggagtgaaaaagaacctgaaaccgtgtacgtacaagcagtgggagcacgcttaggcgtgtgactgcgtaccttttgtataatgggtcagcgacttatattctgtagcaaggttaaccgaataggggagccgaagggaaaccgagtcttaactgggcgttaagttgcagggtatagacccgaaacccggtgatctagccatgggcaggttgaaggttgggtaacactaactggaggaccgaaccgactaatgttgaaaaattagcggatgacttgtggctgggggtgaaaggccaatcaaaccgggagatagctggttctccccgaaagctatttaggtagcgcctcgtgaattcatctccgggggtagagcactgtttcggcaagggggtcatcccgacttaccaacccgatgcaaactgcgaataccggagaatgttatcacgggagacacacggcgggtgctaacgtccgtcgtgaagagggaaacaacccagaccgccagctaaggtcccaaagtcatggttaagtgggaaacgatgtgggaaggcccagacagccaggatgttggcttagaagcagccatcatttaaagaaagcgtaatagctcactggtcgagtcggcctgcgcggaagatgtaacggggctaaaccatgcaccgaagctgcggcagcgacgcttatgcgttgttgggtaggggagcgttctgtaagcctgcgaaggtgtgctgtgaggcatgctggaggtatcagaagtgcgaatgctgacataagtaacgataaagcgggtgaaaagcccgctcgccggaagaccaagggttcctgtccaacgttaatcggggcagggtgagtcgacccctaaggcgaggccgaaaggcgtagtcgatgggaaacaggttaatattcctgtacttggtgttactgcgaaggggggacggagaaggctatgttggccgggcgacggttgtcccggtttaagcgtgtaggctggttttccaggcaaatccggaaaatcaaggctgaggcgtgatgacgaggcactacggtgctgaagcaacaaatgccctgcttccaggaaaagcctctaagcatcaggtaacatcaaatcgtaccccaaaccgacacaggtggtcaggtagagaataccaaggcgcttgagagaactcgggtgaaggaactaggcaaaatggtgccgtaacttcgggagaaggcacgctgatatgtaggtgaagcgacttgctcgtggagctgaaatcagtcgaagataccagctggctgcaactgtttattaaaaacacagcactgtgcaaacacgaaagtggacgtatacggtgtgacgcctgcccggtgccggaaggttaattgatggggttagcgcaagcgaagctcttgatcgaagccccggtaaacggcggccgtaactataacggtcctaaggtagcgaaattccttgtcgggtaagttccgacctgcacgaatggcgtaatgatggccaggctgtctccacccgagactcagtgaaattgaactcgctgtgaagatgcagtgtacccgcggcaagacggtaagaccccgtgaacctttactatagcttgacactgaacattgagccttgatgtgtaggataggtgggaggcttagaagtgtggacgccagtctgcatggagccgaccttgaaataccaccctttaatgtttgatgttctaacgttgacccgtaatccgggttgcggacagtgtctggtgggtagtttgactggggcggtctcctcctaaagagtaacggaggagcacgaaggttggctaatcctggtcggacatcaggaggttagtgcaatggcataagccagcttgactgcgagcgtgacggcgcgagcaggtgcgaaagcaggtcatagtgatccggtggttctgaatggaagggccatcgctcaacggataaaaggtactccggggataacaggctgataccgcccaagagttcatatcgacggcggtgtttggcacctcgatgtcggctcatcacatcctggggctgaagtaggtcccaagggtgatgctgttcgccatttaaagtggtacgcgagctgggtttagaacgtcgtgagacagttcggtccctatctgccgtgggcgctggagaactgaggggggctgctcctagtacgagaggaccggagtggacgcatcactggtgttcgggttgtcatgccaatggcactgcccggtagctaaatgcggaagagataagtgctgaaagcatctaagcacgaaacttgccccgagatgagttctccctgaccctttaagggtcctgaaggaacgttgaagacgacgacgttgataggccgggtgtgtaagcgcagcgatgcgttgagctaaccggtactaatgaaccgtgaggcttaacctt

SEQ ID NO: 395 - DNA, 2904 bp, Artificial
  Synthetic
ggttaagcgactaagcgtacacggtggatgccctggcagtcagaggcgatgaaggacgtgctaatctgcgataagcgtcggtaaggtgatatgaaccgttataaccggcgatttccgaatggggaaacccagtgtgtttcgacacactatcattaactgaatccataggttaatgaggcgaaccgggggaactgaaacatctaagtaccccgaggaaaagaaatcaaccgagattcccccagtagcggcgagcgaacggggagcagcccagagcctgaatcagtgtgtgtgttagtggaagcgtctggaaaggcgcgcgatacagggtgacagccccgtacacaaaaatgcacatgctgtgagctcgatgagtagggcgggacacgtggtatcctgtctgaatatggggggaccatcctccaaggctaaatactcctgactgaccgatagtgaaccagtaccgtgagggaaaggcgaaaagaaccccggcgaggggagtgaaaaagaacctgaaaccgtgtacgtacaagcagtgggagcacgcttaggcgtgtgactgcgtaccttttgtataatgggtcagcgacttatattctgtagcaaggttaaccgaataggggagccgaagggaaaccgagtcttaactgggcgttaagttgcagggtatagacccgaaacccggtgatctagccatgggcaggttgaaggttgggtaacactaactggaggaccgaaccgactaatgttgaaaaattagcggatgacttgtggctgggggtgaaaggccaatcaaaccgggagatagctggttctccccgaaagctatttaggtagcgcctcgtgaattcatctccgggggtagagcactgtttcggcaagggggtcatcccgacttaccaacccgatgcaaactgcgaataccggagaatgttatcacgggagacacacggcgggtgctaacgtccgtcgtgaagagggaaacaacccagaccgccagctaaggtcccaaagtcatggttaagtgggaaacgatgtgggaaggcccagacagccaggatgttggcttagaagcagccatcatttaaagaaagcgtaatagctcactggtcgagtcggcctgcgcggaagatgtaacggggctaaaccatgcaccgaagctgcggcagcgacgcttatgcgttgttgggtaggggagcgttctgtaagcctgcgaaggtgtgctgtgaggcatgctggaggtatcagaagtgcgaatgctgacataagtaacgataaagcgggtgaaaagcccgctcgccggaagaccaagggttcctgtccaacgttaatcggggcagggtgagtcgacccctaaggcgaggccgaaaggcgtagtcgatgggaaacaggttaatattcctgtacttggtgttactgcgaaggggggacggagaaggctatgttggccgggcgacggttgtcccggtttaagcgtgtaggctggttttccaggcaaatccggaaaatcaaggctgaggcgtgatgacgaggcactacggtgctgaagcaacaaatgccctgcttccaggaaaagcctctaagcatcaggtaacatcaaatcgtaccccaaaccgacacaggtggtcaggtagagaataccaaggcgcttgagagaactcgggtgaaggaactaggcaaaatggtgccgtaacttcgggagaaggcacgctgatatgtaggtgaggtccctcgcggatggagctgaaatcagtcgaagataccagctggctgcaactgtttattaaaaacacagcactgtgcaaacacgaaagtggacgtatacggtgtgacgcctgcccggtgccggaaggttaattgatggggttagcgcaagcgaagctcttgatcgaagccccggtaaacggcggccgtaactataacggtcctaaggtagcgaaattccttgtcgggtaagttccgacctgcacgaatggcgtaatgatggccaggctgtctccacccgagactcagtgaaattgaactcgctgtgaagatgcagtgtacccgcggcaagacggaaagaccccgtgaacctttactatagcttgacactgaacattgagccttgatgtgtaggataggtgggaggctttgaagtgtggacgccagtctgcatggagccgaccttgaaataccaccctttaatgtttgatgttctaacgttgacccgtaatccgggttgcggacagtgtctggtgggtagtttgactggggcggtctcctcctaaagagtaacggaggagcacgaaggttggctaatcctggtcggacatcaggaggttagtgcaatggcataagccagcttgactgcgagcgtgacggcgcgagcaggtgcgaaagcaggtcatagtgatccggtggttctgaatggaagggccatcgctcaacggataaaaggtactccggggataacaggctgataccgcccaagagttcatatcgacggcggtgtttggcacctcgatgtcggctcatcacatcctggggctgaagtaggtcccaagggtatggctgttcgccatttaaagtggtacgcgagctgggtttagaacgtcgtgagacagttcggtccctatctgccgtgggcgctggagaactgaggggggctgctcctagtacgagaggaccggagtggacgcatcactggtgttcgggttgtcatgccaatggcactgcccggtagctaaatgcggaagagataagtgctgaaagcatctaagcacgaaacttgccccgagatgagttctccctgactccttgagagtcctgaaggaacgttgaagacgacgacgttgataggccgggtgtgtaagcgcagcgatgcgttgagctaaccggtactaatgaaccgtgaggcttaacctt

SEQ ID NO: 396 - DNA, 2904 bp, Artificial
  Synthetic
ggttaagcgactaagcgtacacggtggatgccctggcagtcagaggcgatgaaggacgtgctaatctgcgataagcgtcggtaaggtgatatgaaccgttataaccggcgatttccgaatggggaaacccagtgtgtttcgacacactatcattaactgaatccataggttaatgaggcgaaccgggggaactgaaacatctaagtaccccgaggaaaagaaatcaaccgagattcccccagtagcggcgagcgaacggggagcagcccagagcctgaatcagtgtgtgtgttagtggaagcgtctggaaaggcgcgcgatacagggtgacagccccgtacacaaaaatgcacatgctgtgagctcgatgagtagggcgggacacgtggtatcctgtctgaatatggggggaccatcctccaaggctaaatactcctgactgaccgatagtgaaccagtaccgtgagggaaaggcgaaaagaaccccggcgaggggagtgaaaaagaacctgaaaccgtgtacgtacaagcagtgggagcacgcttaggcgtgtgactgcgtaccttttgtataatgggtcagcgacttatattctgtagcaaggttaaccgaataggggagccgaagggaaaccgagtcttaactgggcgttaagttgcagggtatagacccgaaacccggtgatctagccatgggcaggttgaaggttgggtaacactaactggaggaccgaaccgactaatgttgaaaaattagcggatgacttgtggctgggggtgaaaggccaatcaaaccgggagatagctggttctccccgaaagctatttaggtagcgcctcgtgaattcatctccgggggtagagcactgtttcggcaagggggtcatcccgacttaccaacccgatgcaaactgcgaataccggagaatgttatcacgggagacacacggcgggtgctaacgtccgtcgtgaagagggaaacaacccagaccgccagctaaggtcccaaagtcatggttaagtgggaaacgatgtgggaaggcccagacagccaggatgttggcttagaagcagccatcatttaaagaaagcgtaatagctcactggtcgagtcggcctgcgcggaagatgtaacggggctaaaccatgcaccgaagctgcggcagcgacgcttatgcgttgttgggtaggggagcgttctgtaagcctgcgaaggtgtgctgtgaggcatgctggaggtatcagaagtgcgaatgctgacataagtaacgataaagcgggtgaaaagcccgctcgccggaagaccaagggttcctgtccaacgttaatcggggcagggtgagtcgacccctaaggcgaggccgaaaggcgtagtcgatgggaaacaggttaatattcctgtacttggtgttactgcgaaggggggacggagaaggctatgttggccgggcgacggttgtcccggtttaagcgtgtaggctggttttccaggcaaatccggaaaatcaaggctgaggcgtgatgacgaggcactacggtgctgaagcaacaaatgccctgcttccaggaaaagcctctaagcatcaggtaacatcaaatcgtaccccaaaccgacacaggtggtcaggtagagaataccaaggcgcttgagagaactcgggtgaaggaactaggcaaaatggtgccgtaacttcgggagaaggcacgctgatatgtaggtgaggtccctcgcggatggagctgaaatcagtcgaagataccagctggctgcaactgtttattaaaaacacagcactgtgcaaacacgaaagtggacgtatacggtgtgacgcctgcccggtgccggaaggttaattgatggggttagcgcaagcgaagctcttgatcgaagccccggtaaacggcggccgtaactataacggtcctaaggtagcgaaattccttgtcgggtaagttccgacctgcacgaatggcgtaatgatggccaggctgtctccacccgagactcagtgaaattgaactcgctgtgaagatgcagtgtacccgcggcaagacggtaagaccccgtgaacctttactatagcttgacactgaacattgagccttgatgtgtaggataggtgggaggctttgaagtgtggacgccagtctgcatggagccgaccttgaaataccaccctttaatgtttgatgttctaacgttgacccgtaatccgggttgcggacagtgtctggtgggtagtttgactggggcggtctcctcctaaagagtaacggaggagcacgaaggttggctaatcctggtcggacatcaggaggttagtgcaatggcataagccagcttgactgcgagcgtgacggcgcgagcaggtgcgaaagcaggtcatagtgatccggtggttctgaatggaagggccatcgctcaacggataaaaggtactccggggataacaggctgataccgcccaagagttcatatcgacggcggtgtttggcacctcgatgtcggctcatcacatcctggggctgaagtaggtcccaagggtatggctgttcgccatttaaagtggtacgcgagctgggtttagaacgtcgtgagacagttcggtccctatctgccgtgggcgctggagaactgaggggggctgctcctagtacgagaggaccggagtggacgcatcactggtgttcgggttgtcatgccaatggcactgcccggtagctaaatgcggaagagataagtgctgaaagcatctaagcacgaaacttgccccgagatgagttctccctgactccttgagagtcctgaaggaacgttgaagacgacgacgttgataggccgggtgtgtaagcgcagcgatgcgttgagctaaccggtactaatgaaccgtgaggcttaacctt

SEQ ID NO: 397 - DNA, 2904 bp, Artificial; identical to SEQ ID NO: 389
  Synthetic

SEQ ID NO: 398 - DNA, 2904 bp, Artificial; identical to SEQ ID NO: 390
  Synthetic

SEQ ID NO: 399 - DNA, 2904 bp, Artificial
  Synthetic
ggttaagcgactaagcgtacacggtggatgccctggcagtcagaggcgatgaaggacgtgctaatctgcgataagcgtcggtaaggtgatatgaaccgttataaccggcgatttccgaatggggaaacccagtgtgtttcgacacactatcattaactgaatccataggttaatgaggcgaaccgggggaactgaaacatctaagtaccccgaggaaaagaaatcaaccgagattcccccagtagcggcgagcgaacggggaggagcccagagcctgaatcagtgtgtgtgttagtggaagcgtctggaaaggcgcgcgatacagggtgacagccccgtacacaaaaatgcacatgctgtgagctcgatgagtagggcgggacacgtggtatcctgtctgaatatggggggaccatcctccaaggctaaatactcctgactgaccgatagtgaaccagtaccgtgagggaaaggcgaaaagaaccccggcgaggggagtgaaaaagaacctgaaaccgtgtacgtacaagcagtgggagcatgcttaggcgtgtgactgcgtaccttttgtataatgggtcagcgacttatattctgtagcaaggttaaccgaataggggagccgaagggaaaccgagtcttaactgggcgttaagttgcagggtatagacccgaaacccggtgatctagccatgggcaggttgaaggttgggtaacactaactggaggaccgaaccgactaatgttgaaaaattagcggatgacttgtggctgggggtgaaaggccaatcaaaccgggagatagctggttctccccgaaagctatttaggtagcgcctcgtgaactcatctccgggggtagagcactgtttcggcaagggggtcatcccgacttaccaacccgatgcaaactgcgaataccggagaatgttatcacgggagacacacggcgggtgctaacgtccgtcgtgaagagggaaacaacccagaccgccagctaaggtcccaaagtcatggttaagtgggaaacgatgtgggaaggcccagacagccaggatgttggcttagaagcagccatcatttaaagaaagcgtaatagctcactggtcgagtcggcctgcgcggaagatgtaacggggctaaaccatgcaccgaagctgcggcagcgacgcttatgcgttgttgggtaggggagcgttctgtaagcctgtgaaggtgtactgtgaggtatgctggaggtatcagaagtgcgaatgctgacataagtaacgataaagcgggtgaaaagcccgctcgccggaagaccaagggttcctgtccaacgttaatcggggcagggtgagtcgacccctaaggcgaggccgaaaggcgtagtcgatgggaaacaggttaatattcctgtacttggtgttactgcgaaggggggacggagaaggctatgttggccgggcgacggttgtcccggtttaagcgtgtaggctggttttccaggcaaatccggaaaatcaaggctgaggcgtgatgacgaggcactacggtgctgaagcaacaaatgccctgcttccaggaaaagcctctaagcatcaggtaacatcaaatcgtaccccaaaccgacacaggtggtcaggtagagaataccaaggcgcttgagagaactcgggtgaaggaactaggcaaaatggtgccgtaacttcgggagaaggcacgctgatatgtaggtgaagcgacttgctcgtggagctgaaatcagtcgaagataccagctggctgcaactgtttattaaaaacacagcactgtgcaaacacgaaagtggacgtatacggtgtgacgcctgcccggtgccggaaggttaattgatggggttagcgcaagcgaagctcttgatcgaagccccggtaaacggcggccgtaactataacggtcctaaggtagcgaaattccttgtcgggtaagttccgacctgcacgaatggcgtaatgatggccaggctgtctccacccgagactcagtgaaattgaactcgctgtgaagatgcagtgtacccgcggcaagacggaaagaccccgtgaacctttactatagcttgacactgaacattgagccttgatgtgtaggataggtgggaggctttgaagtgtggacgccagtctgcatggagccgaccttgaaataccaccctttaatgtttgatgttctaacgttgacccgtaatccgggttgcggacagtgtctggtgggtagtttgactggggcggtctcctcctaaagagtaacggaggagcacgaaggttggctaatcctggtcggacatcaggaggttagtgcaatggcataagccagcttgactgcgagcgtgacggcgcgagcaggtgcgaaagcaggtcatagtgatccggtggttctgaatggaagggccatcgctcaacggataaaaggtactccggggataacaggctgataccgcccaagagttcatatcgacggcggtgtttggcacctcgatgtcggctcatcacatcctggggctgaagtaggtcccaagggtatggctgttcgccatttaaagtggtacgcgagctgggtttagaacgtcgtgagacagttcggtccctatctgccgtgggcgctggagaactgaggggggctgctcctagtacgagaggaccggagtggacgcatcactggtgttcgggttgtcatgccaatggcactgcccggtagctaaatgcggaagagataagtgctgaaagcatctaagcacgaaacttgccccgagatgagttctccctgactccttgagagtcctgaaggaacgttgaagacgacgacgttgataggccgggtgtgtaagcgcagcgatgcgttgagctaaccggtactaatgaaccgtgaggcttaacctt

SEQ ID NO: 400 - DNA, 2904 bp, Artificial
  Synthetic
ggttaagcgactaagcgtacacggtggatgccctggcagtcagaggcgatgaaggacgtgctaatctgcgataagcgtcggtaaggtgatatgaaccgttataaccggcgatttccgaatggggaaacccagtgtgtttcgacacactatcattaactgaatccataggttaatgaggcgaaccgggggaactgaaacatctaagtaccccgaggaaaagaaatcaaccgagattcccccagtagcggcgagcgaacggggaggagcccagagcctgaatcagtgtgtgtgttagtggaagcgtctggaaaggcgcgcgatacagggtgacagccccgtacacaaaaatgcacatgctgtgagctcgatgagtagggcgggacacgtggtatcctgtctgaatatggggggaccatcctccaaggctaaatactcctgactgaccgatagtgaaccagtaccgtgagggaaaggcgaaaagaaccccggcgaggggagtgaaaaagaacctgaaaccgtgtacgtacaagcagtgggagcatgcttaggcgtgtgactgcgtaccttttgtataatgggtcagcgacttatattctgtagcaaggttaaccgaataggggagccgaagggaaaccgagtcttaactgggcgttaagttgcagggtatagacccgaaacccggtgatctagccatgggcaggttgaaggttgggtaacactaactggaggaccgaaccgactaatgttgaaaaattagcggatgacttgtggctgggggtgaaaggccaatcaaaccgggagatagctggttctccccgaaagctatttaggtagcgcctcgtgaactcatctccgggggtagagcactgtttcggcaagggggtcatcccgacttaccaacccgatgcaaactgcgaataccggagaatgttatcacgggagacacacggcgggtgctaacgtccgtcgtgaagagggaaacaacccagaccgccagctaaggtcccaaagtcatggttaagtgggaaacgatgtgggaaggcccagacagccaggatgttggcttagaagcagccatcatttaaagaaagcgtaatagctcactggtcgagtcggcctgcgcggaagatgtaacggggctaaaccatgcaccgaagctgcggcagcgacgcttatgcgttgttgggtaggggagcgttctgtaagcctgtgaaggtgtactgtgaggtatgctggaggtatcagaagtgcgaatgctgacataagtaacgataaagcgggtgaaaagcccgctcgccggaagaccaagggttcctgtccaacgttaatcggggcagggtgagtcgacccctaaggcgaggccgaaaggcgtagtcgatgggaaacaggttaatattcctgtacttggtgttactgcgaaggggggacggagaaggctatgttggccgggcgacggttgtcccggtttaagcgtgtaggctggttttccaggcaaatccggaaaatcaaggctgaggcgtgatgacgaggcactacggtgctgaagcaacaaatgccctgcttccaggaaaagcctctaagcatcaggtaacatcaaatcgtaccccaaaccgacacaggtggtcaggtagagaataccaaggcgcttgagagaactcgggtgaaggaactaggcaaaatggtgccgtaacttcgggagaaggcacgctgatatgtaggtgaagcgacttgctcgtggagctgaaatcagtcgaagataccagctggctgcaactgtttattaaaaacacagcactgtgcaaacacgaaagtggacgtatacggtgtgacgcctgcccggtgccggaaggttaattgatggggttagcgcaagcgaagctcttgatcgaagccccggtaaacggcggccgtaactataacggtcctaaggtagcgaaattccttgtcgggtaagttccgacctgcacgaatggcgtaatgatggccaggctgtctccacccgagactcagtgaaattgaactcgctgtgaagatgcagtgtacccgcggcaagacggtaagaccccgtgaacctttactatagcttgacactgaacattgagccttgatgtgtaggataggtgggaggctttgaagtgtggacgccagtctgcatggagccgaccttgaaataccaccctttaatgtttgatgttctaacgttgacccgtaatccgggttgcggacagtgtctggtgggtagtttgactggggcggtctcctcctaaagagtaacggaggagcacgaaggttggctaatcctggtcggacatcaggaggttagtgcaatggcataagccagcttgactgcgagcgtgacggcgcgagcaggtgcgaaagcaggtcatagtgatccggtggttctgaatggaagggccatcgctcaacggataaaaggtactccggggataacaggctgataccgcccaagagttcatatcgacggcggtgtttggcacctcgatgtcggctcatcacatcctggggctgaagtaggtcccaagggtatggctgttcgccatttaaagtggtacgcgagctgggtttagaacgtcgtgagacagttcggtccctatctgccgtgggcgctggagaactgaggggggctgctcctagtacgagaggaccggagtggacgcatcactggtgttcgggttgtcatgccaatggcactgcccggtagctaaatgcggaagagataagtgctgaaagcatctaagcacgaaacttgccccgagatgagttctccctgactccttgagagtcctgaaggaacgttgaagacgacgacgttgataggccgggtgtgtaagcgcagcgatgcgttgagctaaccggtactaatgaaccgtgaggcttaacctt

SEQ ID NO: 401 - DNA, 32 bp, Artificial
  Synthetic
accggccgcugtgccagcagccgcggtaatac

SEQ ID NO: 402 - DNA, 38 bp, Artificial
  Synthetic
aggggttccgcgcacaugtgacgggcggtgtgtacaag

SEQ ID NO: 403 - DNA, 90 bp, Artificial
  Synthetic
ctcaatgttcagtgtcaagctatagtaaaggttcacggggtcttaccgtcttgccgcgggtacactgcatcttcacagcgagttcaattt

SEQ ID NO: 404 - DNA, 24 bp, Artificial
  Synthetic
gaaattccttgtcgggtaagttcc

SEQ ID NO: 405 - DNA, 29 bp, Artificial
  Synthetic
gaacatcaaacattaaagggtggtatttc

SEQ ID NO: 406 - DNA, 6 bp, Artificial
  Synthetic
accaca

SEQ ID NO: 407 - DNA, 21 bp, Artificial
  Synthetic
attttttccaaccacagatct

SEQ ID NO: 408 - DNA, 30 bp, Artificial
  Synthetic
atgagcaaaggtgaagaactgtttaccggc

SEQ ID NO: 409 - protein, 10 aa, Artificial
  Synthetic
MSKGEELFTG

SEQ ID NO: 410 - DNA, 146 bp, Escherichia coli
actgctctttaacaatttatcagacaatctgtgtgggcactcgaagatacggattcttaacgtcgcaagacgaaaaatgaataccaagtctcaagagtgaacacgtaattcattacgaagtttaattctttgagcgtcaaactttt

SEQ ID NO: 411 - DNA, 440 bp, Escherichia coli
ccttaaagaagcgtactttgtagtgctcacacagattgtctgatagaaagtgaaaagcaaggcgtttacgcgttgggagtgaggctgaagagaataaggccgttcgctttctattaatgaaagctcaccctacacgaaaatatcacgcaacgcgtgataagcaattttcgtgtccccttcgtctagaggcccaggacaccgccctttcacggcggtaacaggggttcgaatcccctaggggacgccacttgctggtttgtgagtgaaagtcgccgaccttaatatctcaaaactcatcttcgggtgatgtttgagatatttgctctttaaaaatctggatcaagctgaaaattgaaacactgaacaacgagagttgttcgtgagtctctcaaattttcgcaacacgatgatgaatcgaaagaaacatcttcgggttgtga

SEQ ID NO: 412 - DNA, 92 bp, Escherichia coli
acaacgccgaagctgttttggcggatgagagaagattttcagcctgatacagattaaatcagaacgcagaagcggtctgataaaacagaatt

SEQ ID NO: 413 - DNA, 247 bp, Escherichia coli
caaataaaacgaaaggctcagtcgaaagactgggcctttcgttttatctgttgtttgtcggtgaacgctctcctgagtaggacaaatccgccgggagcggatttgaacgttgcgaagcaacggcccggagggtggcgggcaggacgcccgccataaactgccaggcatcaaattaagcagaaggccatcctgacggatggcctttttgcgtttctacaaactcttcctgtcgtcatatctacaagcc

SEQ ID NO: 414 - DNA, 1538 bp, Artificial
  Synthetic
taactgaagagtttgatcatggctcagattgaacgctggcggcaggcttaacacatgcaagtcgagcgggggaaggtagcttgctaccggacctagcggcggacgggtgagtaatgcttaggaatctgcctattagtgggggacaacatctcgaaagggatgctaataccgcatacgtcctacgggagaaagcaggggatcttcggaccttgcgctaatagatgagcctaagtcggattagctagttggtggggtaaaggcctaccaaggcgacgatctgtagcgggtctgagaggatgatccgccacactgggactgagacacggcccagactcctacgggaggcagcagtggggaatattggacaatgggcgcaagcctgatccagccatgccgcgtgtgtgaagaaggccttatggttgtaaagcactttaagcgaggaggaggctactttagataatacctagagatagtggacgttactcgcagaataagcaccggctaactctgtgccagcagccgcggtaatacagagggtgcaagcgttaatcggatttactgggcgtaaagcgcgcgtaggcggctaattaagtcaaatgtgaaatccccgagcttaacttgggaattgcattcgatactggttagctagagtgtgggagaggatggtagaattccaggtgtagcggtgaaatgcgtagagatctggaggaataccgatggcgaaggcagccatctggcctaacactgacgctgaggtgcgaaagcatggggagcaaacaggattagataccctggtagtccatgccgtaaacgatgtctactagccgttggggcctttgaggctttagtggcgcagctaacgcgataagtagaccgcctggggagtacggtcgcaagactaaaactcaaatgaattgacgggggcccgcacaagcggtggagcatgtggtttaattcgatgcaacgcgaagaaccttacctggccttgacatagtaagaactttccagagatggattggtgccttcgggaacttacatacaggtgctgcatggctgtcgtcagctcgtgtcgtgagatgttgggttaagtcccgcaacgagcgcaacccttttccttatttgccagcgagtaatgtcgggaactttaaggatactgccagtgacaaactggaggaaggcggggacgacgtcaagtcatcatggcccttacggccagggctacacacgtgctacaatggtcggtacaaagggttgctacacagcgatgtgatgctaatctcaaaaagccgatcgtagtccggattggagtctgcaactcgactccatgaagtcggaatcgctagtaatcgcggatcagaatgccgcggtgaatacgttcccgggccttgtacacaccgcccgtcacaccatgggagtttgttgcaccagaagtagctagcctaactgcaaagagggcggttaccacggtgtggccgatgactggggtgaagtcgtaacaaggtagccgtaggggaacctgcggctggatcatgtggtat

SEQ ID NO: 415 - DNA, 1543 bp, Artificial
  Synthetic
taattgaagagtttgatcatggctcagattgaacgctggcggcaggcctaacacatgcaagtcgagcggcagcacagaggaacttgttccttgggtggcgagcggcggacgggtgagtaatgcctgggaaattgcccggtagagggggataaccattggaaacgatggctaataccgcataacctcgcaagagcaaagcaggggaccttcgggccttgcgctaccggatatgcccaggtgggattagctagttggtgaggtaagggctcaccaaggcgacgatccctagctggtctgagaggatgatcagccacactggaactgagacacggtccagactcctacgggaggcagcagtggggaatattgcacaatgggcgcaagcctgatgcagccatgccgcgtgtatgaagaaggccttcgggttgtaaagtactttcagtagggaggaaggtggttaagttaataccttaatcatttgacgttacctacagaagaagcaccggctaactccgtgccagcagccgcggtaatacggagggtgcaagcgttaatcggaattactgggcgtaaagcgcatgcaggtggtttgttaagtcagatgtgaaagccctgggctcaacctaggaatcgcatttgaaactgacaagctagagtactgtagaggggggtagaatttcaggtgtagcggtgaaatgcgtagagatctgaaggaataccggtggcgaaggcggccccctggacagatactgacactcagatgcgaaagcgtggggagcaaacaggattagataccctggtagtccacgccgtaaacgatgtctacttggaggttgtgacctagagtcgtggctttcggagctaacgcgttaagtagaccgcctggggagtacggtcgcaagattaaaactcaaatgaattgacgggggcccgcacaagcggtggagcatgtggtttaattcgatgcaacgcgaagaaccttacctactcttgacatccagagaatctagcggagacgctggagtgccttcgggagctctgagacaggtgctgcatggctgtcgtcagctcgtgttgtgaaatgttgggttaagtcccgcaacgagcgcaacccttatccttgtttgccagcacgtaatggtgggaactccagggagactgccggtgataaaccggaggaaggtggggacgacgtcaagtcatcatggcccttacgagtagggctacacacgtgctacaatggcgtatacagagggcagcgataccgcgaggtggagcgaatctcacaaagtacgtcgtagtccggattggagtctgcaactcgactccatgaagtcggaatcgctagtaatcgcaaatcagaatgttgcggtgaatacgttcccgggccttgtacacaccgcccgtcacaccatgggagtgggctgcaaaagaagcaggtagtttaaccttcgggaggacgcttgccactttgtggttcatgactggggtgaagtcgtaacaaggtagcgctaggggaacctggcgctggatcatgtggtta

SEQ ID NO: 416 - DNA, 1536 bp, Artificial
  Synthetic
gaactgaagagtttgatcatggctcagattgaacgctggcggcaggcctaacacatgcaagtcgagcggatgaagggagcttgctcctggattcagcggcggacgggtgagtaatgcctaggaatctgcctggtagtgggggataacgtccggaaacgggcgctaataccgcatacgtcctgagggagaaagtgggggatcttcggacctcacgctatcagatgagcctaggtcggattagctagttggtggggtaaaggcctaccaaggcgacgatccgtaactggtctgagaggatgatcagtcacactggaactgagacacggtccagactcctacgggaggcagcagtggggaatattggacaatgggcgaaagcctgatccagccatgccgcgtgtgtgaagaaggtcttcggattgtaaagcactttaagttgggaggaagggcagtaagttaataccttgctgttttgacgttaccaacagaataagcaccggctaacttcgtgccagcagccgcggtaatacgaagggtgcaagcgttaatcggaattactgggcgtaaagcgcgcgtaggtggttcagcaagttggatgtgaaatccccgggctcaacctgggaactgcatccaaaactactgagctagagtacggtagagggtggtggaatttcctgtgtagcggtgaaatgcgtagatataggaaggaacaccagtggcgaaggcgaccacctggactgatactgacactgaggtgcgaaagcgtggggagcaaacaggattagataccctggtagtccacgccgtaaacgatgtcgactagccgttgggatccttgagatcttagtggcgcagctaacgcgataagtcgaccgcctggggagtacggccgcaaggttaaaactcaaatgaattgacgggggcccgcacaagcggtggagcatgtggtttaattcgaagcaacgcgaagaaccttacctggccttgacatgctgagaactttccagagatggattggtgccttcgggaactcagacacaggtgctgcatggctgtcgtcagctcgtgtcgtgagatgttgggttaagtcccgtaacgagcgcaacccttgtccttagttaccagcacctcgggtgggcactctaaggagactgccggtgacaaaccggaggaaggtggggatgacgtcaagtcatcatggcccttacggccagggctacacacgtgctacaatggtcggtacaaagggttgccaagccgcgaggtggagctaatcccataaaaccgatcgtagtccggatcgcagtctgcaactcgactgcgtgaagtcggaatcgctagtaatcgtgaatcagaatgtcacggtgaatacgttcccgggccttgtacacaccgcccgtcacaccatgggagtgggttgctccagaagtagctagtctaaccgcaagggggacggttaccacggagtgattcatgactggggtgaagtcgtaacaaggtagccgtaggggaacctgcggctggatcatgtggtta

SEQ ID NO: 417 - DNA, 1542 bp, Artificial
  Synthetic
taattgaagagtttgatcatggctcagattgaacgctggcggcaggcttaacacatgcaagtcgagcggtagcacaggggagcttgctccctgggtgacgagcggcggacgggtgagtaatgtctgggaaactgcctgatggagggggataactactggaaacggtagctaataccgcataacgtcgcaagaccaaagagggggaccttcgggcctcttgccatcagatgtgcccagatgggattagctagtaggtggggtaatggctcacctaggcgacgatccctagctggtctgagaggatgaccagccacactggaactgagacacggtccagactcctacgggaggcagcagtggggaatattgcacaatgggcgcaagcctgatgcagccatgccgcgtgtgtgaagaaggccttcgggttgtaaagcactttcagcgaggaggaaggtggtgagcttaatacgctcatcaattgacgttactcgcagaagaagcaccggctaactccgtgccagcagccgcggtaatacggagggtgcaagcgttaatcggaattactgggcgtaaagcgcacgcaggcggtttgttaagtcagatgtgaaatccccgggctcaacctgggaactgcatttgaaactggcaagctagagtctcgtagaggggggtagaattccaggtgtagcggtgaaatgcgtagagatctggaggaataccggtggcgaaggcggccccctggacgaagactgacgctcaggtgcgaaagcgtggggagcaaacaggattagataccctggtagtccacgctgtaaacgatgtcgatttggaggttgtgcccttgaggcgtggcttccggagctaacgcgttaaatcgaccgcctggggagtacggccgcaaggttaaaactcaaatgaattgacgggggcccgcacaagcggtggagcatgtggtttaattcgatgcaacgcgaagaaccttacctactcttgacatccagagaacttagcagagatgctttggtgccttcgggaactctgagacaggtgctgcatggctgtcgtcagctcgtgttgtgaaatgttgggttaagtcccgcaacgagcgcaacccttatcctttgttgccagcggttcggccgggaactcaaaggagactgccagtgataaactggaggaaggtggggatgacgtcaagtcatcatggcccttacgagtagggctacacacgtgctacaatggcatatacaaagagaagcgacctcgcgagagcaagcggacctcataaagtatgtcgtagtccggattggagtctgcaactcgactccatgaagtcggaatcgctagtaatcgtagatcagaatgctacggtgaatacgttcccgggccttgtacacaccgcccgtcacaccatgggagtgggttgcaaaagaagtaggtagcttaaccttcgggagggcgcttaccactttgtgattcatgactggggtgaagtcgtaacaaggtaaccgtaggggaacctgcggttggatcatgtggtta

SEQ ID NO: 418 - DNA, 1542 bp, Artificial
  Synthetic
aaattgaagagtttgatcatggctcagattgaacgctggcggcaggcctaacacatgcaagtcgaacggtaacaggaagcagcttgctgcttcgctgacgagtggcggacgggtgagtaatgtctgggaaactgcctgatggagggggataactactggaaacggtggctaataccgcataacgtcgcaagaccaaagagggggaccttcgggcctcttgccatcagatgtgcccagatgggattagctagttggtgaggtaacggctcaccaaggcgacgatccctagctggtctgagaggatgaccagccacactggaactgagacacggtccagactcctacgggaggcagcagtggggaatattgcacaatgggcgcaagcctgatgcagccatgccgcgtgtatgaagaaggccttcgggttgtaaagtactttcagcggggaggaaggtgttgtggttaataaccgcagcaattgacgttacccgcagaagaagcaccggctaactccgtgccagcagccgcggtaatacggagggtgcaagcgttaatcggaattactgggcgtaaagcgcacgcaggcggtctgtcaagtcggatgtgaaatccccgggctcaacctgggaactgcattcgaaactggcaggcttgagtcttgtagaggggggtagaattccaggtgtagcggtgaaatgcgtagagatctggaggaataccggtggcgaaggcggccccctggacaaagactgacgctcaggtgcgaaagcgtggggagcaaacaggattagataccctggtagtccacgccgtaaacgatgtctacttggaggttgtgcccttgaggcgtggcttccggagctaacgcgttaagtagaccgcctggggagtacggccgcaaggttaaaactcaaatgaattgacgggggcccgcacaagcggtggagcatgtggtttaattcgatgcaacgcgaagaaccttacctggtcttgacatccacagaactttccagagatggattggtgccttcgggaactgtgagacaggtgctgcatggctgtcgtcagctcgtgttgtgaaatgttgggttaagtcccgcaacgagcgcaacccttatcctttgttgccagcgattaggtcgggaactcaaaggagactgccagtgataaactggaggaaggtggggatgacgtcaagtcatcatggcccttacgaccagggctacacacgtgctacaatggcgcatacaaagagaagcgacctcgcgagagcaagcggacctcataaagtgcgtcgtagtccggattggagtctgcaactcgactccatgaagtcggaatcgctagtaatcgtggatcagaatgccacggtgaatacgttcccgggccttgtacacaccgcccgtcacaccatgggagtgggttgcaaaagaagtaggtagcttaaccttcgggagggcgcttaccactttgtgattcatgactggggtgaagtcgtaacaaggtaaccgtaggggaacctgcggttggatcatgtggtta

SEQ ID NO: 419 - DNA, 1541 bp, Artificial
  Synthetic
gaacataagagtttgatcctggctcagattgaacgctggcggcatgctttacacatgcaagtcggacggcagcacagggaagcttgcttctcgggtggcgagtggcgaacgggtgagtaacatatcggaacgtaccgggtagcgggggataactgatcgaaagatcagctaataccgcatacgtcttgagagggaaagcaggggaccttcgggccttgcgctatccgagcggccgatatctgattagctggttggcggggtaaaggcccaccaaggcgacgatcagtagcgggtctgagaggatgatccgccacactgggactgagacacggcccagactcctacgggaggcagcagtggggaattttggacaatgggcgcaagcctgatccagccatgccgcgtgtctgaagaaggccttcgggttgtaaaggacttttgtcagggaagaaaaggccgttgccaatatcggcggccgatgacggtacctgaagaataagcaccggctaactacgtgccagcagccgcggtaatacgtagggtgcgagcgttaatcggaattactgggcgtaaagcgggcgcagacggttacttaagcaggatgtgaaatccccgggctcaacccgggaactgcgttctgaactgggtgactcgagtgtgtcagagggaggtggaattccacgtgtagcagtgaaatgcgtagagatgtggaggaataccgatggcgaaggcagcctcctgggataacactgacgttcatgtccgaaagcgtgggtagcaaacaggattagataccctggtagtccacgccctaaacgatgtcaattagctgttgggcaacttgattgcttggtagcgtagctaacgcgtgaaattgaccgcctggggagtacggtcgcaagattaaaactcaaaggaattgacggggacccgcacaagcggtggatgatgtggattaattcgatgcaacgcgaagaaccttacctggttttgacatgtgcggaatcctccggagacggaggagtgccttcgggagccgtaacacaggtgctgcatggctgtcgtcagctcgtgtcgtgagatgttgggttaagtcccgcaacgagcgcaacccttgtcattagttgccatcattcggttgggcactctaatgagactgccggtgacaagccggaggaaggtggggatgacgtcaagtcctcatggcccttatgaccagggcttcacacgtcatacaatggtcggtacagagggtagccaagccgcgaggcggagccaatctcacaaaaccgatcgtagtccggattgcactctgcaactcgagtgcatgaagtcggaatcgctagtaatcgcaggtcagcatactgcggtgaatacgttcccgggtcttgtacacaccgcccgtcacaccatgggagtgggggataccagaagtaggtagggtaaccgcaaggagtccgcttaccacggtatgcttcatgactggggtgaagtcgtaacaaggtagccgtaggggaacctgcggctggatcatgtggttt

SEQ ID NO: 420 - DNA, 2891 bp, Acinetobacter baumannii
agtcaagtaattaagtgcatgtggtggatgccttggcagtcagaggcgatgaaagacgtgatagcctgcgaaaagctccggggaggcggcaaatatcctttgatccggagatgtctgaatgggggaacccacctactttaaggtaggtattgcaacatgaatacatagtgttgcaaggcgaacgaggggaagtgaaacatctcagtacccttaggaaaagaaatcaattgagattccctcagtagcggcgagcgaacggggatcagcccattaagttatgtgtgttttagtggaacgctctgggaagtgcgaacgtagagggtgatattcccgtacacgaaagggcacacataatgatgacgagtagggcgaggcacgtgaaaccttgtctgaatatggggggaccatcctccaaggctaaatactcctgactgaccgatagtgaaccagtaccgtgagggaaaggcgaaaagaacccctgtgaggggagtgaaatagatcctgaaaccgcatgcatacaagcagtgggagcaccttcgtggtgtgactgcgtaccttttgtataatgggtcagcgacttatattcagtagcgaggttaaccgtataggggagccgtagagaaatcgagtcttaatagggcgtttagttgctgggtatagacccgaaaccaggcgatctatccatgagcaggttgaaggttgggtaacactaactggaggaccgaacccactgtcgttgaaaagccaggggatgacttgtggataggggtgaaaggctaatcaagcctggtgatagctggttctccccgaaagctatttaggtagcgcctcggacgaataccatagggggtagagcactgtttcggctagggggtcatcccgacttaccaaaccgatgcaaactccgaatacctatgagtactatccgggagacagactgcgggtgctaacgtccgtagtcaagaggaaaacaatccagaccgccagctaaggccccaaaatcatagttaagtgggaaacgatgtgggaaggcatagacagctaggaggttggcttagaagcagccaccctttaaagaaagcgtaatagctcactagtcgagtcggcctgcgcggaagatgtaacggggctaaaactatgtgccgaagctgcggatttgacattagtcaagtggtaggggagcgttctgtaagccgatgaaggtgtattgagaagtatgctggaggtatcagaagtgcgaatgctgacgtgagtaacgacaaaacgggtgaaaaacccgttcgccgaaagaccaagggttccagtccaacgttaatcggggctgggtgagtcgacccctaaggcgaggccgaaaggcgtagtcgatgggaaattggttaatattccaatacttctgtgtaatgcgatgagaggacggagaaggttaagtcagcctggcgttggttgtccaggtggaaggatgtaggtatgtatcttaggcaaatccggggtactctatactgagatccgatagcaagctgtacttgtacagcgaagtggctgataccatgcttccaggaaaagtctctaagcttcagttacacaggaatcgtacccgaaaccgacacaggtggtcaggtcgagtagaccaaggcgcttgagagaactctgctgaaggaactaggcaaaatggtaccgtaacttcgggagaaggtacgctgttgttggtgatggaacttgcttcctgagctgatgacagccgcagaaaccaggccgctgcaactgtttattaaaaacatagcactctgcaaacacgaaagtggacgtatagggtgtgatgcctgcccggtgctggaaggttaattgatggggttagcgtaagcgaagctcttgatcgaagccccagtaaacggcggccgtaactataacggtcctaaggtagcgaaattccttgtcgggtaagttccggcctgcacgaatggcataatgatggcggcgctgtctccagcagaggctcagtgaaatcgaaatcgctgtgaagatgcagtgtacccgcggctagacggaaagaccccgtgaacctttactgcagcttgacactgaactttgaccttacttgtgtaggataggtgggaggctttgaagttggaacgctagttccaatggagccgtccttgaaataccaccctggtaatgttgaggttctaactctgtcccgttatccgggacgaggaccgtgtctggtgggtagtttgactggggcggtctcctcctaaagagtaacggaggagtacgaaggtgcgctcagcgtggtcggaaatcacgcatagagtataaaggcaaaagcgcgcttaactgcgagacccacaagtcgagcaggtacgaaagtaggtcttagtgatccggtggttctgtatggaagggccatcgctcaacggataaaaggtactctggggataacaggctgataccgcccaagagttcatatcgacggcggtgtttggcacctcgatgtcggctcatctcatcctggggctgaagcaggtcccaagggtatggctgttcgccatttaaagaggtacgcgagctgggtttagaacgtcgtgagacagttcggtccctatctaccgtgggcgctggaaatttgagaggatctgctcctagtacgagaggaccagagtggacgaacctctggtgtaccggttgtgacgccagtcgcatcgccgggtagctatgttcggaagggataaccgctgaaagcatctaagcgggaagcctacctcaagataagatttccctaggaatttattcctctaaagagccgttcgagactaggacgttgataggttggatgtggaagcatagtgatatgtgaagctgaccaatactaattgctcgtgaggcttgactat

SEQ ID NO: 421 - DNA, 2887 bp, Vibrio cholerae
ggttaagtgactaagcgtacacggtggatgcctgggcagtcagaggcgatgaaggacgtactaacttgcgataagcgcagataaggcagtaagagccgtttgagtctgcgatttccgaatggggaaacccaactgcataagcagttactgttaactgaatacataggttaacagagcaaaccgggggaactgaaacatctaagtaccccgaggagaagaaatcaaccgagattccggtagtagcggcgagcgaacctggattagcccttaagcactcggtgaagtaggtgaacaagctggaaagcttggcgatacagggtgatagccccgtaaccgacgcttcatcgagcgtgaaatcgagtagggcgggacacgtgatatcctgtctgaatatggggggaccatcctccaaggctaaatactcctgactgaccgatagtgaaccagtaccgtgagggaaaggcgaaaagaacccctgtgaggggagtgaaatagaacctgaaaccgtgtacgtacaagcagtaggagcaccttcgtggtgtgactgcgtaccttttgtataatgggtcagcgacttatattcagtggcaaggttaaccgtataggggagccgtagcgaaagcgagtcttaattgggcgctcagtctctggatatagacccgaaaccgggtgatctagccatgggcaggttgaaggttgagtaacatcaactggaggaccgaaccgactaatgttgaaaaattagcggatgacttgtggctaggggtgaaaggccaatcaaactcggagatagctggttctccccgaaagctatttaggtagcgcctcggacgaatactactgggggtagagcactgttaaggctagggggtcatcccgacttaccaaccctttgcaaactccgaataccagtaagtactatccgggagacacacggcgggtgctaacgtccgtcgtggagagggaaacaacccagaccgccagctaaggtcccaaagtattgctaagtgggaaacgatgtgggaaggctcagacagctaggatgttggcttagaagcagccatcatttaaagaaagcgtaatagctcactagtcgagtcggcctgcgcggaagatgtaacggggctaagcaatacaccgaagctgcggcaatgtcttttagatattgggtaggggagcgttctgtaagccgttgaaggtgaatcgtaaggtttgctggaggtatcagaagtgcgaatgctgacatgagtaacgacaaagggggtgaaaaacctcctcgccggaagaccaagggttcctgtccaacgttaatcggggcagggtgagtcgacccctaaggtgaggccgaaaggcgtaatcgatgggaaacgggttaatattcccgtacttctgactattgcgatggggggacggagaaggctaggtgggccaggcgacggttgtcctggttcaagtgcgtaggcttgagagttaggtaaatccggctctctttaaggctgagacacgacgtcgagctgctacggcagtgaagtcattgatgccatgcttccaggaaaagcctctaagcttcagatagtcaggaatcgtaccccaaaccgacacaggtggtcgggtagagaataccaaggcgcttgagagaactcgggtgaaggaactaggcaaaatggtaccgtaacttcgggagaaggtacgctcttgatggtgaagtccctcgcggatggagctgacgagagtcgcagataccaggtggctgcaactgtttattaaaaacacagcactgtgcaaaatcgcaagatgacgtatacggtgtgacgcctgcccggtgccggaaggttaattgatggggttagcgcaagcgaagctcttgatcgaagccccggtaaacggcggccgtaactataacggtcctaaggtagcgaaattccttgtcgggtaagttccgacctgcacgaatggcgtaatgatggccacgctgtctccacccgagactcagtgaaattgaaatcgctgtgaagatgcagtgtacccgcggctagacggaaagaccccgtgaacctttactacagcttggcactgaacattgaacctacatgtgtaggataggtgggagtctatgaagacgtgacgccagttgcgttggagccgtccttgaaataccacccttgtatgtttgatgttctaacgttggcccctaatcggggttgcggacagtgcctggtgggtagtttgactggggcggtctcctcccaaagagtaacggaggagcacgaaggtgggctaatcacggttggacatcgtgaggttagtgcaatggcataagcccgcttaactgcgagaatgacggttcgagcaggtgcgaaagcaggtcatagtgatccggtggttctgtatggaagggccatcgctcaacggataaaaggtactccggggataacaggctgataccgcccaagagttcatatcgacggcggtgtttggcacctcgatgtcggctcatcacatcctggggctgaagtcggtcccaagggtatggctgttcgccatttaaagtggtacgcgagctgggtttagaacgtcgtgagacagttcggtccctatctgccgtgggcgttggaagattgaagggggctgctcctagtacgagaggaccggagtggacgaacctctggtgttcgggttgtgtcgccagacgcattgcccggtagctaagttcggaattgataagcgctgaaagcatctaagcgcgaagcgagccctgagatgagtcttccctgacggtttaaccgtcctaaagggttgttcgagactagaacgttgataggcagggtgtgtaagcgttgtgaggcgttgagctaacctgtactaattgcccgtgaggcttaaccat

SEQ ID NO: 422 - DNA, 2891 bp, Pseudomonas aeruginosa
ggtcaagtgaagaagcgcatacggtggatgccttggcagtcagaggcgatgaaagacgtggtagcctgcgaaaagcttcggggagtcggcaaacagactttgatccggagatctctgaatgggggaacccacctaggataacctaggtatcttgtactgaatccataggtgcaagaggcgaaccaggggaactgaaacatctaagtaccctgaggaaaagaaatcaaccgagattcccttagtagtggcgagcgaacggggattagcccttaagcttcattgattttagcggaacgctctggaaagtgcggccatagtgggtgatagccccgtacgcgaaaggatctttgaagtgaaatcgagtaggacggagcacgagaaactttgtctgaacatggggggaccatcctccaaggctaaatactactgactgaccgatagtgaaccagtaccgtgagggaaaggcgaaaagaaccccggagaggggagtgaaatagaacctgaaaccgtatgcgtacaagcagtgggagcctacttgttaggtgactgcgtaccttttgtataatgggtcagcgacttatattcagtggcaagcttaaccgtatagggtaggcgtagcgaaagcgagtcttaatagggcgtttagtcgctgggtatagacccgaaaccgggcgatctatccatgagcaggttgaaggttaggtaacactgactggaggaccgaacccactcccgttgaaaaggtaggggatgacttgtggatcggagtgaaaggctaatcaagctcggagatagctggttctcctcgaaagctatttaggtagcgcctcatgtatcactctggggggtagagcactgtttcggctagggggtcatcccgacttaccaaaccgatgcaaactccgaatacccagaagtgccgagcatgggagacacacggcgggtgctaacgtccgtcgtgaaaagggaaacaacccagaccgccagctaaggtcccaaagttgtggttaagtggtaaacgatgtgggaaggcttagacagctaggaggttggcttagaagcagccaccctttaaagaaagcgtaatagctcactagtcgagtcggcctgcgcggaagatgtaacggggctcaaaccacacaccgaagctgcgggtgtcacgtaagtgacgcggtagaggagcgttctgtaagcctgtgaaggtgagttgagaagcttgctggaggtatcagaagtgcgaatgctgacatgagtaacgacaatgggtgtgaaaaacacccacgccgaaagaccaagggttcctgcgcaacgttaatcgacgcagggttagtcggttcctaaggcgaggctgaaaagcgtagtcgatgggaaacaggttaatattcctgtacttctggttactgcgatggagggacggagaaggctaggccagcttggcgttggttgtccaagtttaaggtggtaggctgaaatcttaggtaaatccggggtttcaaggccgagagctgatgacgagtcgtcttttagatgacgaagtggttgatgccatgcttccaagaaaagcttctaagcttcaggtaaccaggaaccgtaccccaaaccgacacaggtggtcgggtagagaataccaaggcgcttgagagaactcgggtgaaggaactaggcaaaatggcaccgtaacttcgggagaaggtgcgccggctagggtgaaggatttactccgtaagctctggctggtcgaagataccaggccgctgcgactgtttattaaaaacacagcactctgcaaacacgaaagtggacgtatagggtgtgacgcctgcccggtgccggaaggttaattgatggggttagcgcaagcgaagctcttgatcgaagccccggtaaacggcggccgtaactataacggtcctaaggtagcgaaattccttgtcgggtaagttccgacctgcacgaatggcgtaacgatggcggcgctgtctccacccgagactcagtgaaattgaaatcgctgtgaagatgcagtgtatccgcggctagacggaaagaccccgtgaacctttactgtagctttgcactggactttgagcctgcttgtgtaggataggtgggaggctttgaagcgtggacgccagttcgcgtggagccatccttgaaataccaccctggcatgcttgaggttctaactctggtccgtaatccggatcgaggacagtgtatggtgggcagtttgactggggcggtctcctcctaaagagtaacggaggagtacgaaggtgcgctcagaccggtcggaaatcggtcgcagagtataaaggcaaaagcgcgcttgactgcgagacagacacgtcgagcaggtacgaaagtaggtcttagtgatccggtggttctgtatggaagggccatcgctcaacggataaaaggtactccggggataacaggctgataccgcccaagagttcatatcgacggcggtgtttggcacctcgatgtcggctcatcacatcctggggctgaagccggtcccaagggtatggctgttcgccatttaaagtggtacgcgagctgggtttagaacgtcgtgagacagttcggtccctatctgccgtggacgtttgagatttgagaggggctgctcctagtacgagaggaccggagtggacgaacctctggtgttccggttgtcacgccagtggcattgccgggtagctatgttcggaaaagataaccgctgaaagcatctaagcgggaaacttgcctcaagatgagatctcactgggaacttgattcccctgaagggccgtcgaagactacgacgttgataggctgggtgtgtaagcgttgtgaggcgttgagctaaccagtactaattgcccgtgaggcttgaccat

SEQ ID NO: 423 - DNA, 2908 bp, Serratia marcescens
ggttaagtgactaagcgtacacggtggatgcctaggcagtcagaggcgatgaagggcgtgctaatctgcgaaaagcgtcggtaaggtgatatgaaccgttataaccggcgatacccgaatggggaaacccagtgtgtttcgacacactatcatgtcatgaatacatagtggcatgaggcgaaccgggggaactgaaacatctaagtaccccgaggaaaagaaatcaaccgagattcccccagtagcggcgagcgaacggggaggagcccagaacctgaatcggcttgtgtgttagtggaagcgtctggaaagtcgcgcagcaaagggtgatagccccgtacactaaaatgcacaggtcgtgagttcgatgagtagggcgggacacgtgacatcctgtctgaatatggggggaccatcctccaaggctaaatactcctgactgaccgatagtgaaccagtaccgtgagggaaaggcgaaaagaaccccggcgaggggagtgaaatagaacctgaaaccgtgtacgtacaagcagtgggagcaccttcgtggtgtgactgcgtaccttttgtataatgggtcagcgacttatattttgtagcaaggttaaccgtataggggagccgtagggaaaccgagtcttaactgggcgaatagttgcaaggtatagacccgaaacccggtgatctagccatgggcaggttgaaggttgggtaacactaactggaggaccgaaccgactaatgttgaaaaattagcggatgacttgtggctgggggtgaaaggccaatcaaaccgggagatagctggttctccccgaaagctatttaggtagcgcctcgtgaactcatcttcgggggtagagcactgtttcggctagggggccatcccggcttaccaaaccgatgcaaactccgaataccgaagaatgttatcacgggagacacacggcgggtgctaacgtccgtcgtgaagagggaaacaacccagaccgccagctaaggtcccaaagtcatggttaagtgggaaacgatgtgggaaggcatagacagccaggatgttggcttagaagcagccatcatttaaagaaagcgtaatagctcactggtcgagtcggcctgcgcggaagatgtaacggggctaaaccatgcaccgaagctgcggcagcgacgcttaggcgttgttgggtaggggagcgttctgtaagccgttgaaggtggcctgtgagggttgctggaggtatcagaagtgcgaatgctgacataagtaacgataaagcgggtgaaaagcccgctcgccggaagaccaagggttcctgtccaacgttaatcggggcagggtgagtcgacccctaaggcgaggctgaaaagcgtagtcgatgggaaacaggttaatattcctgtacttggtgttactgcgaaggggggacggagaaggctaggctagccgggcgacggttgtcccggtttaagcgtgtagggggtgtgacctggtaaatccggttgcatattaaccctgaggcgtgatgacgatgcactacggtgcagaagtagttgatgccctgcttccaggaaaatcctctaagcatcaggtaacattaaatcgtaccccaaaccgacacaggtggtcaggtagagaataccaaggcgcttgagagaactcgggtgaaggaactaggcaaaatggtgccgtaacttcgggagaaggcacgctggcatgtaggtgaagtccctcgcggatggagctgaagccagtcgaagataccagctggctgcaactgtttaataaaaacacagcactgtgcaaacacgaaagtggacgtatacggtgtgacgcctgcccggtgctggaaggttaattgatggggtcagccgcaaggcgaagctcttgatcgaagccccagtaaacggcggccgtaactataacggtcctaaggtagcgaaattccttgtcgggtaagttccgacctgcacgaatggcgtaatgatggccaggctgtctccacccgagactcagtgaaattgaactcgctgtgaagatgcagtgtacccgcggcaagacggaaagaccccgtgaacctttactatagcttgacactgaacattgagccttgatgtgtaggataggtgggaggctttgaagcgtggacgccagtctgcgtggagccatccttgaaataccaccctttaatgtttgatgttctaactcggccccgtaatccggggtgaggacagtgtctggtgggtagtttgactggggcggtctcctcccaaagagtaacggaggagcacgaaggttagctaatcacggtcggacatcgtgaggttagtgcaaaggcataagctagcttgactgcgagagtgacggctcgagcaggtacgaaagtaggtcttagtgatccggtggttctgaatggaagggccatcgctcaacggataaaaggtactccggggataacaggctgataccgcccaagagttcatatcgacggcggtgtttggcacctcgatgtcggctcatcacatcctggggctgaagtaggtcccaagggtatggctgttcgccatttaaagtggtacgcgagctgggtttagaacgtcgtgagacagttcggtccctatctgccgtgggcgttggaagattgagaggggttgctcctagtacgagaggaccggagtgaacgcaccactggtgttcgggttgtcatgccaatggcattgcccggtagctaagtgcggaaaagataagcgctgaaagcatctaagcgcgaaacttgcctcaagatgagtcttccctgggcctttaaggtccctgaaggaacgtttaagactaagacgttgataggctgggtgtgtaagtgcagcgatgcattgagctaaccagtactaatgatccgtgaggcttaacctt

SEQ ID NO: 424 - DNA, 2992 bp, Salmonella enterica
ggttaagcgactaagcgtacacggtggatgccctggcagtcagaggcgatgaagggcgtgctaatctgcgataagcgccggtaaggtgatatgaaccgttataaccggcgatacccgaatggggaaacccagtgtgattcgtcacactatcattaactgaatccataggttaatgaggcgaaccgggggaactgaaacatctaagtaccccgaggaaaagaaatcaaccgagattcccccagtagcggcgagcgaacggggaggagcccagagcctgaatcagcatgtgtgttagtggaagcgtctggaaaggtgcgcgatacagggtgacagccccgtacacaaaagcgcatgtgctgtgagctcgatgagtagggcgggacacgtggtatcctgtctgaatatggggggaccatcctccaaggctaaatactcctgactgaccgatagtgaaccagtaccgtgagggaaaggcgaaaagaaccccggcgaggggagtgaaaaagaacctgaaaccgtgtacgtacaagcagtgggagcacaggtttacctgtgtgactgcgtaccttttgtataatgggtcagcgacttatattctgtagcaaggttaaccgtataggggagccgtagggaaaccgagtcttaaccgggcgttaagttgcagggtatagacccgaaacccggtgatctagccatgggcaggttgaaggttgggtaacactaactggaggaccgaaccgactaatgttgaaaaattagcggatgacctgtggctgggggtgaaaggccaatcaaaccgggagatagctggttctccccgaaagctatttaggtagcgcctcgtgaattcatctccgggggtagagcactgtttcggctagggggccatcccggcttaccaacccgatgcaaactgcgaataccggagaatgttatcacgggagacacacggcgggtgctaacgtccgtcgtgaagagggaaacaacccagaccgccagctaaggtcccaaagtcatggttaagtgggaaacgatgtgggaaggcccagacagccaggatgttggcttagaagcagccatcatttaaagaaagcgtaatagctcactggtcgagtcggcctgcgcggaagatgtaacggggctaaaccatgcaccgaagctgcggcagcgaacgtatcacccaagacaactttacggagttgacgattgacggagcgaagcgacgtcaaagcgttcattaaagtcgagttggcttagggatacgttcgttgggtaggggagcgttctgtaagcctgtgaaggtgtgtcgtgaggcatgctggaggtatcagaagtgcgaatgctgacataagtaacgataaagcgggtgaaaagcccgctcgccggaagaccaagggttcctgtccaacgttaatcggggcagggtgagtcgacccctaaggcgaggccgaaaggcgtagtcgatgggaaacgggttaatattcccgtacttggtgttactgcgaaggggggacggagaaggctatgttggccgggcgacggttgtcccggtttaagcgtgtaggtgtgtgttccaggtaaatccggttcactttaacactgaggcgtgacgacgaggcactacggtgctgaagcaacaaatgccctgcttccaggaaaagcctctaagcatcaggtaacacgaaatcgtaccccaaaccgacacaggtggtcaggtagagaataccaaggcgcttgagagaactcgggtgaaggaactaggcaaaatggtgccgtaacttcgggagaaggcacgctgacacgtaggtgaagtgatttactcatggagctgaagtcagtcgaagataccagctggctgcaactgtttattaaaaacacagcactgtgcaaacacgaaagtggacgtatacggtgtgacgcctgcccggtgccggaaggttaattgatggggtcagcgcaagcgaagctcctgatcgaagccccggtaaacggcggccgtaactataacggtcctaaggtagcgaaattccttgtcgggtaagttccgacctgcacgaatggcgtaatgatggccaggctgtctccacccgagactcagtgaaattgaactcgctgtgaagatgcagtgtacccgcggcaagacggaaagaccccgtgaacctttactatagcttgacactgaacattgagccttgatgtgtaggataggtgggaggctttgaagtgtggacgccagtctgcatggagccgaccttgaaataccaccctttaatgtttgatgttctaacgtggacccgtaatccgggttgcggacagtgtctggtgggtagtttgactggggcggtctcctcctaaagagtaacggaggagcacgaaggttggctaatcctggtcggacatcaggaggttagtgcaatggcataagccagcttgactgcgagcgtgacggcgcgagcaggtgcgaaagcaggtcatagtgatccggtggttctgaatggaagggccatcgctcaacggataaaaggtactccggggataacaggctgataccgcccaagagttcatatcgacggcggtgtttggcacctcgatgtcggctcatcacatcctggggctgaagtaggtcccaagggtatggctgttcgccatttaaagtggtacgcgagctgggtttagaacgtcgtgagacagttcggtccctatctgccgtgggcgctggagaactgaggggggctgctcctagtacgagaggaccggagtggacgcatcactggtgttcgggttgtcatgccaatggcactgcccggtagctaaatgcggaagagataagtgctgaaagcatctaagcacgaaacttgccccgagatgagttctccctgagacttagagtctcctgaaggaacgttgaagacgacgacgttgataggccgggtgtgtaagcgcagcgatgcgttgagctaaccggtactaatgaaccgtgaggcttaacctt

SEQ ID NO: 425 - DNA, 2892 bp, Neisseria gonorrhoeae
agtcaagtgaataagtgcatcaggcggatgccttggcgatgataggcgacgaaggacgtgtaagcctgcgaaaagcgcgggggagctggcaataaagctatgattccgcgatgtccgaatggggaaacccactgcattctgtgcagtatcctaagttgaatacataggcttagagaagcgaacccggagaactgaaccatctaagtacccggaggaaaagaaatcaaccgagattccgcaagtagtggcgagcgaacgcggaggagcctgtacgtaataactgtcgagatagaagaacaagctgggaagcttgaccatagcgggtgacagtcccgtattcgaaatctcaacagcggtactaagcgtacgaaaagtagggcgggacacgtgaaatcctgtctgaatatggggggaccatcctccaaggctaaatactcatcatcgaccgatagtgaaccagtaccgtgagggaaaggcgaaaagaaccccgggaggggagtgaaacagaacctgaaacctgatgcatacaaacagtgggagcgccctagtggtgtgactgcgtaccttttgtataatgggtcaacgacttacattcagtagcgagcttaaccggataggggaggcgtagggaaaccgagtcttaatagggcgatgagttgctgggtgtagacccgaaaccgagtgatctatccatggtcaggttgaaggtgccgtaacaggtactggaggaccgaacccacgcatgttgcaaaatgcggggatgagctgtgggtaggggtgaaaggctaaacaaactcggagatagctggttctccccgaaaactatttaggtagtgcctcgagcaagacactgatgggggtaaagcactgttatggctagggggttattgcaacttaccaacccatggcaaactcagaataccatcaagtggttcctcgggagacagacagcgggtgctaacgtccgttgtcaagagggaaacaacccagaccgccggctaaggtcccaaatgatagattaagtggtaaacgaagtgggaaggcacagacagccaggatgttggcttagaagcagccatcatttaaagaaagcgtaatagctcactggtcgagtcgtcctgcgcggaagatgtaacggggctcaaatctataaccgaagctgcggatgccggtttaccggcatggtaggggagcgttctgtaggctgatgaaggtgcattgtaaagtgtgctggaggtatcagaagtgcgaatgttgacatgagtagcgataaagcgggtgaaaagcccgctcgccgaaagcccaaggtttcctacgcaacgttcatcggcgtagggtaagtcggcccctaaggcgaggcagaaatgcgtagtcgatgggaaacaggttaatattcctgtacttgattcaaatgcgatgtggggacggagaaggttaggttggcaagctgttggaatagcttgtttaagccggtaggtggaagacttaggcaaatccgggttttcttaacaccgagaagtgatgacgagtgtctacggacacgaagcaaccgataccacgcttccaggaaaagccactaagcttcagtttgaatcgaaccgtaccgcaaaccgacacaggtgggcaggatgagaattctaaggcgcttgagagaactcgggagaaggaactcggcaaattgataccgtaacttcgggagaaggtatgccctctaaggttaaggacttgctccgtaagccccggagggtcgcagagaataggtggctgcgactgtttattaaaaacacagcactctgccaacacgaaagtggacgtatagggtgtgacgcctgcccggtgccggaaggttaattgaagatgtgcaagcatcggatcgaagccccggtaaacggcggccgtaactataacggtcctaaggtagcgaaattccttgtcgggtaagttccgacccgcacgaatggcgtaacgatggccacactgtctcctcccgagactcagcgaagttgaagtggttgtgaagatgcaatctacccgctgctagacggaaagaccccgtgaacctttactgtagctttgcattggactttgaagtcacttgtgtaggataggtgggaggcttggaagcagagacgccagtctctgtggagtcgtccttgaaataccaccctggtgtctttgaggttctaacccagacccgtcatccgggtcggggaccgtgcatggtaggcagtttgactggggcggtctcctcccaaagcgtaacggaggagttcgaaggttacctaggtccggtcggaaatcggactgatagtgcaatggcaaaaggtagcttaactgcgagaccgacaagtcgggcaggtgcgaaagcaggacatagtgatccggtggttctgtatggaagggccatcgctcaacggataaaaggtactccggggataacaggctgattccgcccaagagttcatatcgacggcggagtttggcacctcgatgtcggctcatcacatcctggggctgtagtcggtcccaagggtatggctgttcgccatttaaagtggtacgtgagctgggtttaaaacgtcgtgagacagtttggtccctatctgcagtgggcgttggaagtttgacgggggctgctcctagtacgagaggaccggagtggacgaacctctggtgtaccggttgtaacgccagttgcatagccgggtagctaagttcggaagagataagcgctgaaagcatctaagcgcgaaactcgcctgaagatgagacttcccttgcggtttaaccgcactaaagggtcgttcgagaccaggacgttgataggtggggtgtggaagcgcggtaacgcgtgaagctaacccatactaattgcccgtgaggcttgactct

SEQ ID NO: 426 - DNA, 119 bp, Acinetobacter baumannii
gtgctggcgaccatagcaagagtgaaccacctgatcccttcccgaactcagaagtgaaacctcttagcgctgatggtagtgtggggttacccatgtgagagtaagtcatcgccagctca

SEQ ID NO: 427 - DNA, 120 bp, Vibrio cholerae
tgcttggcgaccatagcgttttggacccacctgactccatcccgaactcagaagtgaaacgaaacagcgtcgatggtagtgtggggtctccccatgtgagagtagaacatcgccaggctt

SEQ ID NO: 428 - DNA, 120 bp, Pseudomonas aeruginosa
tgcttgacgatcatagagcgttggaaccacctgatcccttcccgaactcagaagtgaaacgacgcatcgccgatggtagtgtggggtctccccatgtgagagtaggtcatcgtcaagctc

SEQ ID NO: 429 - DNA, 119 bp, Serratia marcescens
gcctggcggcaatagcgcggtggtcccacctgaccccatgccgaactcagaagtgaaacgccgtagcgccgatggtagtgtggggtctccccatgcgagagtaggacactgccaggcat

SEQ ID NO: 430 - DNA, 120 bp, Salmonella enterica
tgcctggcggccgtagcgcggtggtcccacctgaccccatgccgaactcagaagtgaaacgccgtagcgccgatggtagtgtggggtctccccatgcgagagtagggaactgccaggcat

SEQ ID NO: 431 - DNA, 117 bp, Neisseria gonorrhoeae
gtttggcggccatagcgagttggtcccacgccttcccatcccgaacaggaccgtgaaacgactcagcgccgatgatagtgtggttcttccatgcgaaagtaggtcactgccaaacac

SEQ ID NO: 432 - DNA, 264 bp, Neisseria gonorrhoeae
atggcaaacagcgcacaagcacgcaaacgtgcccgccagtccgtcaaacaacgcgcccacaacgctagcctgcgtaccgcattccgcaccgcagtgaaaaaagtattgaaagcagtcgaagcaggcgataaagctgccgcacgagcggtttaccaagagtccgtcaaagtcatcgaccgcatcgccgacaaaggcgtgttccacaaaaacaaagcggctcgccacaaaagccgcctgtctgcaaaagtaaaagcactggcttga

SEQ ID NO: 433 - protein, 87 aa, Neisseria gonorrhoeae
MANSAQARKRARQSVKQRAHNASLRTAFRTAVKKVLKAVEAGDKAAARAVYQESVKVIDRIADKGVFHKNKAARHKSRLSAKVKALA

SEQ ID NO: 434 - DNA, 246 bp, Neisseria gonorrhoeae
atggtagttatccgtttggcacgcggcggctcgaaacaccgccccttctacaacgtcatcgttactgactcacgcagccgccgcgacggccgcttcatcgaacgcgtaggcttctacaaccccgtagccaacgaaaaacaagagcgcgtccgcctcaatgcagaccgcctgaaccactggattgcacaaggcgcgcaagtcagcgactccgttgcaaaactgattaaagaacaaaaagccgtctaa

SEQ ID NO: 435 - protein, 81 aa, Neisseria gonorrhoeae
MVVIRLARGGSKHRPFYNVIVTDSRSRRDGRFIERVGFYNPVANEKQERVRLNADRLNHWIAQGAQVSDSVAKLIKEQKAV

SEQ ID NO: 436 - DNA, 1686 bp, Neisseria gonorrhoeae
atgtctatggaaaattttgctcagctgttggaagaaagctttaccctgcaagaaatgaacccgggtgaggtgattaccgctgaagtagtggcaatcgaccaaaacttcgttaccgtaaacgcaggtctgaaatcagaatccctgatcgatgtagctgaattcaaaaacgctcaaggcgaaattgaagttaaagtcggcgacttcgttaccgttaccatcgaatccgtcgaaaacggcttcggcgaaaccaaactgtcccgcgaaaaagccaaacgcgcagccgattggatcgctttggaagaagccatggaaaacggcaacatcctgtccggcatcatcaacggtaaagtcaaaggcggcctgaccgttatgatcagcagcatccgcgcattcctgccgggttctttggtcgacgtacgtcccgttaaagacacttcccattttgaaggcaaagagatcgaattcaaagtgatcaaactggacaaaaaacgcaacaacgtcgttgtttcccgccgcgccgttttggaagccactttgggtgaagaacgcaaagccctgctggaaaacctgcaagaaggctccgtcatcaaaggcatcgtcaaaaatatcaccgactacggcgcattcgttgacctgggcggcatcgacggcctgctgcacatcaccgatttggcatggcgtcgcgtgaaacacccgagcgaagtcttggaagtcggtcaggaagttgaagccaaagtattgaaattcgaccaagaaaaacaacgtgtttccttgggtatgaaacaactgggcgaagatccttggagcggtctgacccgccgttatccgcaagccacccgcctgttcggcaaagtatccaacctgaccgactacggcgcattcgtcgaaatcgaacaaggcatcgaaggtttggtacacgtctccgaaatggactggaccaacaaaaacgtacacccgagcaaagtcgtacaactgggtgacgaagtcgaagtcatgattttggaaatcgacgaaggccgccgccgtatctctttgggtatgaaacaatgccaagccaatccttgggaagaatttgccgccaaccacaacaaaggagacaaaatctccggtgcggttaaatccattaccgatttcggcgtattcgtcggcctgcccggcggcatcgacggtctggttcacctgtccgacctgtcttggaccgaatccggcgaagaagccgtacgcaaatacaaaaaaggagaagaagtcgaagccgtcgtattggcaatcgatgtggaaaaagaacgcatctccttgggtatcaaacaactggaaggcgatcctttcggcaacttcatcagcgtgaacgacaaaggttctttggttaaaggttccgtgaaatctgttgatgccaaaggcgctgttatcgccctgtctgacgaagtagaaggctacctgcctgcttccgaatttgcagccgaccgcgttgaagacttgaccaccaaactgaaagaaggcgatgaagttgaagccgtcatcgttaccgttgaccgcaaaaaccgcagcatcaaactttccgttaaagccaaagatgccaaagaaagccgcgaagcactgaactccgtcaatgccgccgccaatgcgaatgccggtaccaccagcttgggcgacctgctgaaagccaaactctccggcgaacaagaataa

SEQ ID NO: 437 - protein, 561 aa, Neisseria gonorrhoeae
MSMENFAQLLEESFTLQEMNPGEVITAEVVAIDQNFVTVNAGLKSESLIDVAEFKNAQGEIEVKVGDFVTVTIESVENGFGETKLSREKAKRAADWIALEEAMENGNILSGIINGKVKGGLTVMISSIRAFLPGSLVDVRPVKDTSHFEGKEIEFKVIKLDKKRNNVVVSRRAVLEATLGEERKALLENLQEGSVIKGIVKNITDYGAFVDLGGIDGLLHITDLAWRRVKHPSEVLEVGQEVEAKVLKFDQEKQRVSLGMKQLGEDPWSGLTRRYPQATRLFGKVSNLTDYGAFVEIEQGIEGLVHVSEMDWTNKNVHPSKVVQLGDEVEVMILEIDEGRRRISLGMKQCQANPWEEFAANHNKGDKISGAVKSITDFGVFVGLPGGIDGLVHLSDLSWTESGEEAVRKYKKGEEVEAVVLAIDVEKERISLGIKQLEGDPFGNFISVNDKGSLVKGSVKSVDAKGAVIALSDEVEGYLPASEFAADRVEDLTTKLKEGDEVEAVIVTVDRKNRSIKLSVKAKDAKESREALNSVNAAANANAGTTSLGDLLKAKLSGEQE

SEQ ID NO: 438 - DNA, 270 bp, Neisseria gonorrhoeae
atggcactgaccgtagaacaaaaagcacaaatcgttaaagatttccaacgtaaagaaggcgacaccggctcttctgaagtacaagttgccctgttgactttccgcatcaacgatctgaccccccacttcaaagccaaccccaaagaccaccacagccgtcgcggcctgttgaaaatggtcagccaacgccgtcgcctgttggtctatttgcgccgtacccagcccgatacgtatcgcgcgttgattacccgcttgggtctgcgtaaataa

SEQ ID NO: 439 - protein, 89 aa, Neisseria gonorrhoeae
MALTVEQKAQIVKDFQRKEGDTGSSEVQVALLTFRINDLTPHFKANPKDHHSRRGLLKMVSQRRRLLVYLRRTQPDTYRALITRLGLRK

SEQ ID NO: 440 - DNA, 264 bp, Bordetella pertussis
atggccaataccgcccaagcccgcaagcgcgctcgccaatcggtccagcgcaacaagcacaactccagcctgcgctcgatgctgcgcaccgccatcaagcgcgttcgccaatccatcgccactggcgataaggctgctgctggcgaaacgctgcgtaaagccacgagcgtgattgacagcgtggctgacaagaacatcatccacaagaacaaggctgctcgccacaagagccgcctggctgccgccgtcaaggcgctggcctaa

SEQ ID NO: 441 - protein, 87 aa, Bordetella pertussis
MANTAQARKRARQSVQRNKHNSSLRSMLRTAIKRVRQSIATGDKAAAGETLRKATSVIDSVADKNIIHKNKAARHKSRLAAAVKALA

SEQ ID NO: 442 - DNA, 261 bp, Bordetella pertussis
atgctggtgattcgtctggcccgcggtggctcgaagaagcgtccgttttacaacctggtagctaccgattcgcgcaatcgtcgcgatggccgtttcgtcgagcgcgttggcttttacaacccggttgccgctgaaggcaccgagaatctgcgcatcgccctggaccgcgtgcaatactggaccggcaacggcgcgctgctgtcgcccgccgtcgagcgcctggtcaaggaatactcggccaaggtttcggctgctgcctga

SEQ ID NO: 443 - protein, 86 aa, Bordetella pertussis
MLVIRLARGGSKKRPFYNLVATDSRNRRDGRFVERVGFYNPVAAEGTENLRIALDRVQYWTGNGALLSPAVERLVKEYSAKVSAAA

SEQ ID NO: 444 - DNA, 1716 bp, Bordetella pertussis
atgtcttccgtttccacctccgccatccttggcggcgaaaacttcgccgacctgttcgcagaaagcctcaagagccaggacatgaagtccggcgaggtcatcagcgcagaagtcgtgcgcgtcgaccacaacttcgtggtcgtcaacgccggcctgaagtccgaagcgctgattcccctggaagagttcctcaacgaccagggcgaactcgaagttcaacccggcgacttcgtctcggtggcgatcgattcgctggagaacggctacggcgacaccatcctgtcgcgcgaccgcgccaagcgtctgtcggcctggctgcaactggagcaggccctcgagaacggcgagctggtcaccggcacgatcaccggcaaggtcaagggcggcctgaccgtcatgaccaacggcatccgcgcgttcctgcccggttcgctggtcgacctgcgtccggtcaaggacaccacgccgtacgaaggcaagaccctcgaattcaaggtcatcaagctggaccgcaagcgcaacaacgtcgtgctgtcgcgccgccaggtgctggaagccagcatgggcgaagagcgccagaagctgctcgagacgctgcacgaaggcgcggtggtcaagggcgtggtcaagaacatcaccgactacggcgcgttcgtcgacctgggcggcatcgatggcctgctgcacatcaccgacatggcctggcgccgtgtgcgtcacccgtccgaagtcctgcaagtgggtcaggaagtcgaagccaaggtgctcaagttcgaccaggaaaagagccgcgtctccctgggcgtcaagcagctgggcgaagatccgtgggtgggcctggctcgccgctacccgcagggcacccgcctgttcggcaaggtcaccaacctgaccgactacggcgcgttcgtcgaagtcgaagccggcatcgaaggcctggtgcacgtgtccgaaatggactggaccaacaagaacgtcgatccgcgcaaggtcgtgaccctgggcgaagaagtcgaagtcatggtcctggaaatcgacgaagaccgtcgccgcatttcgctgggcatgaagcagtgccgccagaacccgtgggaagagttcgccaccaacttcaagcgtggtgacaaggtccgcggcgccatcaagtcgatcaccgacttcggcgtgttcgtcggcctgcccggcggcatcgacggcctggtccatctgtccgacctgtcgtggacggaatcgggcgaggaagccgtgcgcaacttcaagaagggcgacgagctggaagccgtggtgctgggcatcgataccgagaaagagcgcatctcgctgggtatcaagcagctcgaaggcgacccgttcaacaacttcgttgccacgcacgacaagggcgccgttgttccgggcaccatcaagtcggtcgagcccaagggcgccgtgatcaccctgtcggtggatgtggaaggctacctgcgcgcctccgagatctcctcgggccgcgtcgaagacgctaccaccgtgctgaaggctggcgagaacatcgaagccatgatcgtcaacatcgaccgcaaggcgcgttcgatccagctgtcgatcaaggcccgcgataacgccgagacggccgagaccatccagcgcatgtccgaggcgagcgcttcgtcgggtacgacgaacttgggcgcgctgctcaaggccaagctggaccaacagcgcaacgacggttga

SEQ ID NO: 445 - protein, 571 aa, Bordetella pertussis
MSSVSTSAILGGENFADLFAESLKSQDMKSGEVISAEVVRVDHNFVVVNAGLKSEALIPLEEFLNDQGELEVQPGDFVSVAIDSLENGYGDTILSRDRAKRLSAWLQLEQALENGELVTGTITGKVKGGLTVMTNGIRAFLPGSLVDLRPVKDTTPYEGKTLEFKVIKLDRKRNNVVLSRRQVLEASMGEERQKLLETLHEGAVVKGVVKNITDYGAFVDLGGIDGLLHITDMAWRRVRHPSEVLQVGQEVEAKVLKFDQEKSRVSLGVKQLGEDPWVGLARRYPQGTRLFGKVTNLTDYGAFVEVEAGIEGLVHVSEMDWTNKNVDPRKVVTLGEEVEVMVLEIDEDRRRISLGMKQCRQNPWEEFATNFKRGDKVRGAIKSITDFGVFVGLPGGIDGLVHLSDLSWTESGEEAVRNFKKGDELEAVVLGIDTEKERISLGIKQLEGDPFNNFVATHDKGAVVPGTIKSVEPKGAVITLSVDVEGYLRASEISSGRVEDATTVLKAGENIEAMIVNIDRKARSIQLSIKARDNAETAETIQRMSEASASSGTTNLGALLKAKLDQQRNDG

SEQ ID NO: 446 - DNA, 270 bp, Bordetella pertussis
atgtctgtagctgacatcaaaaaatccgaaatcgtcgcgcaattccaacgcgctcaaggcgataccggctcccctgaagttcaggtggcactgcttaccgctcgcatcaacgaactgaccggtcacttcaaagaacacatgaaggaccaccactcgcgccgcggcctgctgcgcatggtcagccgtcgtcgcaagctgctcgactatctcaagggccgcaatcccgattcgtaccgcgcactgatcgaaaaactcggtctgcgcaagtga

SEQ ID NO: 447 - protein, 89 aa, Bordetella pertussis
MSVADIKKSEIVAQFQRAQGDTGSPEVQVALLTARINELTGHFKEHMKDHHSRRGLLRMVSRRRKLLDYLKGRNPDSYRALIEKLGLRK

SEQ ID NO: 448 - DNA, 264 bp, Alcaligenes faecalis
atggctaataccgcacaagcacgcaagcgcgcccgccaagcagtggctcgcaacaaacacaacgccagcatccgttccatgctgcgtaccgctatcaagcgcgttcgccaggctatcgaagccggtgacaaaactgctgctaacgaagttttccgcaaagcgaccagcatcattgatcgcgttgccgacaagaacatcattcacaagaacaaggctgcccgccacaagagccgcctgtctgctgctatcaaggccctggcctga

SEQ ID NO: 449 - protein, 87 aa, Alcaligenes faecalis
MANTAQARKRARQAVARNKHNASIRSMLRTAIKRVRQAIEAGDKTAANEVFRKATSIIDRVADKNIIHKNKAARHKSRLSAAIKALA

SEQ ID NO: 450 - DNA, 261 bp, Alcaligenes faecalis
atggtggtaattcgcttggcccgtggtggctccaaaaagcgtcctttttacaacgtagtagccgccgaggcgagccaacgccgtgatggtcgcttcatcgaacgtctgggtttctacaaccccgtcgctggcgaaggtcatgaaaacctgcgtctgcaaatggaccgcgttaagcacttcaccgacaacggtgctcaggtttcgcctgctgtggctcgcctgttgaaagaatactcggctaaggttgcttcggctgcctaa

SEQ ID NO: 451 - protein, 85 aa, Alcaligenes faecalis
MVVIRLARGGSKKRPFYNVVAAEASQRRDGRFIERLGFYNPVAGEGHENLRLQMDRVKHFTDNGAQVSPAVARLLKEYSAKVASA

SEQ ID NO: 452 - DNA, 1719 bp, Alcaligenes faecalis
atgtccactaaccttcacacagacgcaacgggcggcgaaagctttgccgatttgtttgcagaaagcattaaaaaccaagacctgaaaagcggcgaagttatctccgccgaggttctgcgtattgaccacaactacgttctggtcaatgctggcctgaagtccgaagcactgatccctctggaagagttcctgaacgatcagggcgagctggaagttcaagctggtgactttgtttccgtggcaatcgacgcctttgaaaacggctacggcgacaccatcctgtcccgcgaccgcgccaagcgtctgtcggcctggttgtccctcgagcaagcgcttgagtccggcgaactggtcaacggtaccatcactggtaaggtcaagggcggtctgactgtcatgaccaacggcatccgtgcattcttgcccggttcgctggttgatctgcgtcctgtcaaggacaccacgccatacgaaggcaagaccctggaattcaaggttatcaagctcgatcgcaagcgtaacaacgtcgtgttgtcgcgtcgcgctgtgctggaagcctccatgggcgaagagcgtcagaaactgctggaaaccctgtccgaaggcgctatcgtcaaaggtatcgtcaagaatatcaccgattacggtgcgttcgtggatctgggcggcatcgacggtctgctgcacatcaccgacatggcatggcgccgtgttcgtcacccatccgaagttctgcaggtgggtcaggaaatcgaagccaaggtcctcaagttcgatcaggaaaagagccgcgtctccctgggcgtcaagcagctgggcgaagatccatggatcggtctggcacgtcgctacccacaaaacacccgtttgttcggcaaggttaccaacctgaccgactacggtgcatttgttgaagtggaagacggtatcgaaggtctggttcacgtatccgaaatggattggaccaacaagaacgttgacccacgcaaggttgtgaccttgggtgaagaagtcgaagtcatggttctggaaatcgacgaagatcgtcgtcgtatctccttgggcatgaagcagtgccgtgccaacccatgggaagatttcgccatcaacttcaagcgcggcgacaaggttcgcggtggcatcaagtccatcaccgacttcggcgtgtttgttggtctgccaggcggcatcgacggtctggttcacctgtccgacctgtcctggtccgagactggcgaagaagccgttcgcaacttcaagaagggcgacgaagttgacgccgtggttctgggcatcgacaccgacaaagagcgcatttccctgggtatcaaacagctggaaggcgatccgttcaacaacttcgtagctacctacgacaagggtgctgtagttagcggcgtcgtcaagtcggtagaagccaagggtgctgttgttactctgtcgctggacgttgaaggctacctgcgcgcctccgagatctcctcgggtcgtgttgaagatgccacgacggctctgaaagaaggtcaggaaatcgaaaccatgatcttgagcgtggatcgcaagacccgttcgattcagttgtccatcaaggctcgtgataccgccgaaaccgctcaatccatggcccgcctgaccgaagccagcgcttcgtccggtacgaccaatctgggtgctctgctgcgtgccaagctggaccagcagcaacgtgacgacggttaa

SEQ ID NO: 453 - protein, 572 aa, Alcaligenes faecalis
MSTNLHTDATGGESFADLFAESIKNQDLKSGEVISAEVLRIDHNYVLVNAGLKSEALIPLEEFLNDQGELEVQAGDFVSVAIDAFENGYGDTILSRDRAKRLSAWLSLEQALESGELVNGTITGKVKGGLTVMTNGIRAFLPGSLVDLRPVKDTTPYEGKTLEFKVIKLDRKRNNVVLSRRAVLEASMGEERQKLLETLSEGAIVKGIVKNITDYGAFVDLGGIDGLLHITDMAWRRVRHPSEVLQVGQEIEAKVLKFDQEKSRVSLGVKQLGEDPWIGLARRYPQNTRLFGKVTNLTDYGAFVEVEDGIEGLVHVSEMDWTNKNVDPRKVVTLGEEVEVMVLEIDEDRRRISLGMKQCRANPWEDFAINFKRGDKVRGGIKSITDFGVFVGLPGGIDGLVHLSDLSWSETGEEAVRNFKKGDEVDAVVLGIDTDKERISLGIKQLEGDPFNNFVATYDKGAVVSGVVKSVEAKGAVVTLSLDVEGYLRASEISSGRVEDATTALKEGQEIETMILSVDRKTRSIQLSIKARDTAETAQSMARLTEASASSGTTNLGALLRAKLDQQQRDDG

SEQ ID NO: 454 - DNA, 270 bp, Alcaligenes faecalis
atggcagttgcagatatcaaaaaagtcgatatcgtttccgagtttcagcgtaaacaaggcgatacaggctccccagaagtgcaagtggctttgctgaccgctcgcatcaacgaattgaccggccacttcaaggctcacaacaaggatcaccactcccgtcgtggtctgttgcgcatggttagccgtcgtcgcaaattgctggattacctgaaaggtcgtaatccagacgcttaccgtgctttgatcgaaaaactcggtctgcgtaagtga

SEQ ID NO: 455 - protein, 89 aa, Alcaligenes faecalis
MAVADIKKVDIVSEFQRKQGDTGSPEVQVALLTARINELTGHFKAHNKDHHSRRGLLRMVSRRRKLLDYLKGRNPDAYRALIEKLGLRK

SEQ ID NO: 456 - DNA, 261 bp, Vibrio cholerae
ttggcaaataacaaatctgctaagaagcgcgctatccaagctgagaaacgtcgccagcacaatgctagccgtcgttctatgatgcgcacttacatgaagaaaactgttgctgcaatcgctgctggcgacaaagaagctgcaactgctgcattcgctgtagttacaccaatcctagaccgcatggcgactaaaggccttattcacaagaataaagcagctcgtcacaagtctcgcttctttgctgctatcaacgctctgtaa

SEQ ID NO: 457 - protein, 86 aa, Vibrio cholerae
LANNKSAKKRAIQAEKRRQHNASRRSMMRTYMKKTVAAIAAGDKEAATAAFAVVTPILDRMATKGLIHKNKAARHKSRFFAAINAL

SEQ ID NO: 458 - DNA, 249 bp, Vibrio cholerae
atggtaaccattcgtttggcacgtcacggcgcgaaaaagcgtccattctatcaaatcgttgtagctgacagccgcaactcagcaactggccgtttcatcgagaaagtaggtttctttaaccctactgctactggtcaagaagaaggcctgcgtctagacctagatcgcgtgaaccactgggtttcacaaggcgcatctctgtctgatcgcgtagcacagctagttaaaaccgctcaaaaagcggcttaa

SEQ ID NO: 459 - protein, 82 aa, Vibrio cholerae
MVTIRLARHGAKKRPFYQIVVADSRNSATGRFIEKVGFFNPTATGQEEGLRLDLDRVNHWVSQGASLSDRVAQLVKTAQKAA

SEQ ID NO: 460 - DNA, 1671 bp, Vibrio cholerae
atgactgaatcttttgctcaactctttgaagagtttctgaacgagacccaattccaacaaggtactatcgttaaaggtactgtagtagcaatcgagaacggctacgttctggttgatgctggcctgaagtctgagtctgctatccctgctgaacaattcaagaacgctgctggcgaactagaagttcaagtcggttctcaagtagacgtagctctggacgcggttgaagatggtttcggcgaaactcaactttctcgtgagaaagcgaagcgccatgaagcttggatcgtacttgaaaaagcttacgaagaagctgcaactgttatcggtatcattaacggtaaagttaaaggtggtttcactgttgaactgaacggtatccgtgcgttcctgccaggttctctggttgacgtacgtccaatccgtgacactgctcacttagaaaacaaagagctagagttcaaagttatcaagctagaccagaagcgtaacaacgttgttgtttctcgtcgtgcagttatcgaatctgaaagcagcgtagagcgtgatgaactgcttgaaactctgcaagaaggtactgaagttaaaggtatcgttaagaacctgactgactacggtgcgttcgttgatctgggcggcgttgacggtctgctacacatcactgacatggcttggaagcgcgttaagcatccatcagaaatcgttaacgttggtgacgagatcctagttaaagtactgaagttcgatcgtgatcgtactcgcgtatctctaggtctgaaacagctaggcgaagatccatgggtagcaatcgctaagcgttacccagaaggtcacaaactgtctggccgtgtaactaacctgactgactacggctgcttcgttgaaatcgaagaaggcgttgaaggtctagtacacgtttctgaaatggactggacgaacaagaacatccacccatctaaagttgttaatgttggcgacgaagttgaggttatggttctggatatcgacgaagagcgtcgtcgtatctctctaggcctgaaacagtgtaaagctaacccatggcaatcattcgctgaagcgcaagctaaaggcgacaaagtaactggtaagatcaagtctatcactgactttggtatcttcatcggtctagaaggcggtatcgacggtctggttcacctgtctgacatctcttggaacgtaccaggagaagaagctgttcgtgaattcaagaaaggcgacgaaatctctgcagttgttctagcagtagacgctgagcgtgagcgtatttctctgggcatcaagcaaatggaaaacgatccattcaacgcttatgtttcagacaacaagaaaggtgctctggttaacggtactgtaactgcagttgacgcgaaaggcgcaaccatcgagctagaagacggcgttgaaggttacatccgcgcttctgaagtatcacgtgaccgtatcgaagatgcatcactgatcctgaacgttggtgacaaagttgaagcgaaatttactggtgttgaccgtaaaaaccgcgtaatcaacctgtctatcaaagcgaaagatgaagctgaagagcaagaagtaatggcaactctgaacaagcaagatgaagctgcgttcggtaatgctatggctgacgctttcaaagcagcgaaaggcgaataa

SEQ ID NO: 461 - protein, 556 aa, Vibrio cholerae
MTESFAQLFEEFLNETQFQQGTIVKGTVVAIENGYVLVDAGLKSESAIPAEQFKNAAGELEVQVGSQVDVALDAVEDGFGETQLSREKAKRHEAWIVLEKAYEEAATVIGIINGKVKGGFTVELNGIRAFLPGSLVDVRPIRDTAHLENKELEFKVIKLDQKRNNVVVSRRAVIESESSVERDELLETLQEGTEVKGIVKNLTDYGAFVDLGGVDGLLHITDMAWKRVKHPSEIVNVGDEILVKVLKFDRDRTRVSLGLKQLGEDPWVAIAKRYPEGHKLSGRVTNLTDYGCFVEIEEGVEGLVHVSEMDWTNKNIHPSKVVNVGDEVEVMVLDIDEERRRISLGLKQCKANPWQSFAEAQAKGDKVTGKIKSITDFGIFIGLEGGIDGLVHLSDISWNVPGEEAVREFKKGDEISAVVLAVDAERERISLGIKQMENDPFNAYVSDNKKGALVNGTVTAVDAKGATIELEDGVEGYIRASEVSRDRIEDASLILNVGDKVEAKFTGVDRKNRVINLSIKAKDEAEEQEVMATLNKQDEAAFGNAMADAFKAAKGE

SEQ ID NO: 462 - DNA, 270 bp, Vibrio cholerae
atgtctctgaatgcagaaactaaagcagcaatcgttgctgaatatgcacgttgcgaaaatgacacaggttcaccagaagtacagatcgctctactgactgcttctatcaaccacctgcaaggtcacttccaagcacacaaaggcgatcaccacagccgtcgtggtctgctacgtatggtttcaagccgtcgtaaactgctggactacctgaaaggtaaagatctgtctcgttaccaagatctgatcaaacgtctaggcctgcgtcgttaa

SEQ ID NO: 463 - protein, 89 aa, Vibrio cholerae
MSLNAETKAAIVAEYARCENDTGSPEVQIALLTASINHLQGHFQAHKGDHHSRRGLLRMVSSRRKLLDYLKGKDLSRYQDLIKRLGLRR

SEQ ID NO: 464 - DNA, 267 bp, Acinetobacter baumannii
gtggcaaactctgctcaagctaaaaaacgtgcgcgccaaaacgttaaagcgcgtaaacacaacgcaagcttgcgttctatggttcgtacttacatcaaacgtactttaagtgcaatcgctggtggtgattatgctgttgctacagaagcttacaaaaaagctgttcctgtaatcgaccgcatggctgataaaggcatcatccacaaaaataaagctgctcgtcataagagccgtttaaatgctcaagttaaagctttagctaactaa

SEQ ID NO: 465 - protein, 88 aa, Acinetobacter baumannii
VANSAQAKKRARQNVKARKHNASLRSMVRTYIKRTLSAIAGGDYAVATEAYKKAVPVIDRMADKGIIHKNKAARHKSRLNAQVKALAN

SEQ ID NO: 466 - DNA, 252 bp, Acinetobacter baumannii
atggttgttattcgtttagcacgtggcggcgcaaaaaaacgtccattctatcaaatcgttgtgactgatagccgcaatgcacgtgatggtcgtttcatcgagcgtatcggtttctttaacccaactgcacaaggtcaagcagaaaaacttcgtttagacgcagaccgttttgctcactgggtttctcaaggtgctcaaccttctgaacgtgttgcttctttggctgctcaagctaaaaaagctactgcataa

SEQ ID NO: 467 - protein, 83 aa, Acinetobacter baumannii
MVVIRLARGGAKKRPFYQIVVTDSRNARDGRFIERIGFFNPTAQGQAEKLRLDADRFAHWVSQGAQPSERVASLAAQAKKATA

SEQ ID NO: 468 - DNA, 1674 bp, Acinetobacter baumannii
atgaccgaatcttttgcagccctctttgaagaaagtgaattaaacctcaacgttgaaaagggtgcagtcatccaaggtgttgttgtaaacatcgatagcgactgggttactgttgacactggccttaaatcagaaggcattgttgaccgtgctgaatttttaaatgaacaacgtgaacttgaagttcaggttggtgacactgttgacgtagttgttgaagctcttgacaacggtatgggtcaaacagttttatcacgtgaaaaagctaaacgtgctgaaacttggactaaacttgaaaaaatctttgaagatggcgaaatcgttactggtgttatctctggtaaagttaaaggcggtttcactgttgacatcggtcctgttcgtgcgttcttaccaggttcattagttgacactcgtcctatccgtgacactactcaccttgaaggtaaagagttagagtttaaagtaatcaaacttgatgctaaacgtaacaacgttgttgtatctcgtcgtgctgttatggaagctgaatcttctgctgaccgtgaagcattacttgctcaacttgaagaaggtcaaacagttacaggtactatcaagaaccttactgattacggtgcattcgttgatcttggcggtattgatggtcttcttcatatcacagatatggcttggaagcgtatcaagcacccttcagaagttgttgaagttggtcaagaagttactgttaaagtacttaaatttgaccgtgaacgtaaccgcgtatctttaggccttaaacaattaggcgaagatccatggttagcgatcatgagccgttaccctaaaggttctatcgttaaagcacgtgttactaacttaactgactacggttgtttcgctgaaatcgctgaaggcgttgaaggtttagtacacgtttctgaaatggaccacactaacaaaaacatccacccatctaaagttgttcagatcggtgacgaagttgatgttatggttcttgaagttgacgaagaacgtcgtcgtatcagccttggtatcaaacaaactcgtgctaacccatgggaagagtttgctaagtctcatgagaaaggcgaaaaagtttcaggcacaatcaagtctatcactgactttggtatcttcattggtttaaatggcggtatcgacggtctagttcacttgtctgatatttcttggaacgaacaaggcgaagaagctatccgtcgttacaagaaaggtgacactgttgaagcagttatcttgtctgtagacgctgaaggtaaccgtatcagccttggtatcaagcaattgaacagcgatccgttcaatgatttcttagctgctaacgaacgtggtgctttagttaaaggtactgtgactgcagttgatgctcgtggcgcaactgttaagttagctgacgaagtagaagctactcttaaagcttctgaaatcaaccgtgaccgcgttgaagatgcaactaaattcttagaagttggtcaagaagttgaagctaaaatcatcaacgttgatcgtaaatctcgctctatcaacttgtctatcaaagcgaaagacgaagctgaagagaaagaagcagtagctaacttacgtacagcatcagcttctcaagaaaatggtcctaagactattggtgacttgatcaaagcgcaaatgaagtaa

SEQ ID NO: 469 - protein, 557 aa, Acinetobacter baumannii
MTESFAALFEESELNLNVEKGAVIQGVVVNIDSDWVTVDTGLKSEGIVDRAEFLNEQRELEVQVGDTVDVVVEALDNGMGQTVLSREKAKRAETWTKLEKIFEDGEIVTGVISGKVKGGFTVDIGPVRAFLPGSLVDTRPIRDTTHLEGKELEFKVIKLDAKRNNVVVSRRAVMEAESSADREALLAQLEEGQTVTGTIKNLTDYGAFVDLGGIDGLLHITDMAWKRIKHPSEVVEVGQEVTVKVLKFDRERNRVSLGLKQLGEDPWLAIMSRYPKGSIVKARVTNLTDYGCFAEIAEGVEGLVHVSEMDHTNKNIHPSKVVQIGDEVDVMVLEVDEERRRISLGIKQTRANPWEEFAKSHEKGEKVSGTIKSITDFGIFIGLNGGIDGLVHLSDISWNEQGEEAIRRYKKGDTVEAVILSVDAEGNRISLGIKQLNSDPFNDFLAANERGALVKGTVTAVDARGATVKLADEVEATLKASEINRDRVEDATKFLEVGQEVEAKIINVDRKSRSINLSIKAKDEAEEKEAVANLRTASASQENGPKTIGDLIKAQMK

SEQ ID NO: 470 - DNA, 270 bp, Acinetobacter baumannii
atggctttaactaatgcagaccgcgcagagatcattgctaaatttgctcgcgctgaaaacgacactggttcaccagaagtacaagtagctttattgactgctcaaatcaatgatttacaaggtcactttaaagctcacaaacacgaccaccatagccgtcgcggtttgatccgtatggttaaccaacgtcgtaaattacttgactacttaaatggtaaagaccacgagcgttacactgctttgatcggtgctttaggtctacgtcgttaa

SEQ ID NO: 471 - protein, 89 aa, Acinetobacter baumannii
MALTNADRAEIIAKFARAENDTGSPEVQVALLTAQINDLQGHFKAHKHDHHSRRGLIRMVNQRRKLLDYLNGKDHERYTALIGALGLRR

SEQ ID NO: 472 - DNA, 276 bp, Pseudomonas aeruginosa
gtggccaacacaccttccgccaaaaaacgcgccaaacaggctgagaagcgtcgcagccacaacgccagcctgcgctccatggtgcgcacctacatcaagaacgtcgtgaaagccatcgacgccaaggacctggaaaaagcccaggccgccttcaccgccgctgtaccggtgatcgaccgcatggctgacaaaggcatcatccacaagaacaaggctgctcgtcataagagccgtctgagcggccacatcaaggccctcagcaccgctgccgcctaa

SEQ ID NO: 473 - protein, 91 aa, Pseudomonas aeruginosa
VANTPSAKKRAKQAEKRRSHNASLRSMVRTYIKNVVKAIDAKDLEKAQAAFTAAVPVIDRMADKGIIHKNKAARHKSRLSGHIKALSTAAA

SEQ ID NO: 474 - DNA, 252 bp, Pseudomonas aeruginosa
atggtaaccatccgtcttgctcgtggcggctccaaaaagcgccccttctaccacctgaccgtgaccaacagccgcaatgcgcgcgatggtcgcttcgtcgagcgcatcggtttcttcaacccggttgcgactggtggcgaagtgcgtctgtccgtcgaccaggagcgtgctacctactggctcggccagggtgcacagccgtctgagcgcgttgctcagctgctcaaggacgctgccaaggcaaacgcctaa

SEQ ID NO: 475 - protein, 83 aa, Pseudomonas aeruginosa
MVTIRLARGGSKKRPFYHLTVTNSRNARDGRFVERIGFFNPVATGGEVRLSVDQERATYWLGQGAQPSERVAQLLKDAAKANA

SEQ ID NO: 476 - DNA, 1680 bp, Pseudomonas aeruginosa
atgagcgaaagcttcgcagaactctttgaagaaagtctgaaatccctcgacatgcagccgggtgccatcatcaccggcatcgtggtcgacatcgatggtgactgggtcaccgtccatgccggtctgaaatccgagggcgtcatcccggtcgagcagttctacaacgaacagggcgagctgaccatcaaggtgggtgacgaagtccacgtcgcactggacgcggtagaagacggctttggcgagaccaagctgtcccgcgagaaagccaagcgcgccgagagctggattgttctggaagcggctttcgctgccgacgaagtggtcaagggcgtcatcaacggcaaggtcaagggcggtttcaccgtcgacgtcaacggcatccgcgcgttcctgccgggttctctggtcgacgttcgtccggttcgcgacaccacccacctggaaggcaaagagctcgagttcaaggtcatcaagctcgaccagaagcgcaacaacgttgtcgtttcccgccgcagcgtcctggaagccgagaacagcgccgagcgtgaagctctgctggaatcgctgcaggaaggccagcaggtcaaaggtatcgtcaagaacctcaccgactacggcgcattcgtggacctgggcggcgtagacggcctgctacacatcaccgacatggcctggaagcgcatcaagcatccgtccgagatcgtcaacgttggcgacgagatcgacgtcaaggtcctgaagttcgaccgcgagcgcaaccgtgtatccctgggcctgaagcaactgggcgaagacccgtgggttgccatcaaggcgcgttacccggaaggtacccgcgtcatggcccgcgtcaccaacctcaccgactacggctgcttcgccgagctggaagagggcgtggaaggcctggtacacgtctccgaaatggactggaccaacaagaacatccatccgtcgaaagtcgtccaggttggcgatgaagtggaagttcaggttctggacatcgacgaagagcgtcgtcgtatctccctgggtatcaagcagtgcaaatccaacccgtgggaagacttctccagccagttcaacaagggtgaccgtatctccggtaccatcaagtcgatcaccgacttcggtatcttcatcggtctggacggcggcatcgacggcctggtccacctgtccgacatctcctggaacgaagtcggcgaagaagccgtacgtcgcttcaagaagggcgacgagctggaaaccgtcatcctgtcggtcgatccggagcgcgagcgcatctccctgggcatcaagcagctggaagacgatccgttctccaactacgcgtccctgcacgagaaaggcagcatcgtccgcggtaccgtgaaggaagtcgacgccaagggcgctgtcatcagcctgggcgacgacatcgaaggtatcctgaaggcttccgaaatcagccgtgaccgcgtcgaagacgcgcgcaacgtcctgaaggaaggcgaggaagtcgaagccaagatcatcagcatcgaccgcaagagccgcgtcatcagcctctccgtcaagtccaaggacgtcgacgacgagaaggacgcaatgaaagaactgcgtaagcaggaagtagaaagcgctggtccgaccaccatcggtgatctgatccgtgctcagatggagaatcagggctaa

SEQ ID NO: 477 - protein, 559 aa, Pseudomonas aeruginosa
MSESFAELFEESLKSLDMQPGAIITGIVVDIDGDWVTVHAGLKSEGVIPVEQFYNEQGELTIKVGDEVHVALDAVEDGFGETKLSREKAKRAESWIVLEAAFAADEVVKGVINGKVKGGFTVDVNGIRAFLPGSLVDVRPVRDTTHLEGKELEFKVIKLDQKRNNVVVSRRSVLEAENSAEREALLESLQEGQQVKGIVKNLTDYGAFVDLGGVDGLLHITDMAWKRIKHPSEIVNVGDEIDVKVLKFDRERNRVSLGLKQLGEDPWVAIKARYPEGTRVMARVTNLTDYGCFAELEEGVEGLVHVSEMDWTNKNIHPSKVVQVGDEVEVQVLDIDEERRRISLGIKQCKSNPWEDFSSQFNKGDRISGTIKSITDFGIFIGLDGGIDGLVHLSDISWNEVGEEAVRRFKKGDELETVILSVDPERERISLGIKQLEDDPFSNYASLHEKGSIVRGTVKEVDAKGAVISLGDDIEGILKASEISRDRVEDARNVLKEGEEVEAKIISIDRKSRVISLSVKSKDVDDEKDAMKELRKQEVESAGPTTIGDLIRAQMENQG

SEQ ID NO: 478 - DNA, 270 bp, Pseudomonas aeruginosa
atggcactgagcgttgaagaaaaagcgcagatcgttaacgaatacaagcaagctgaaggcgacaccggttccccggaagtgcaggtagccctgctgtccgccaacatcaacaagctgcaggatcacttcaaggccaacggcaaggatcaccattcccgccgtggtctgatccgtatggttaaccagcgccgtaagctgctggactacctgaagggcaaagacgtgtctcgctacactgccctgatcggccgtctgggtctgcgtcgctaa

SEQ ID NO: 479 - protein, 89 aa, Pseudomonas aeruginosa
MALSVEEKAQIVNEYKQAEGDTGSPEVQVALLSANINKLQDHFKANGKDHHSRRGLIRMVNQRRKLLDYLKGKDVSRYTALIGRLGLRR

1. A method for increasing the activity and/or improving the maturation of a non-host cell ribosomal RNA (rRNA) in a host cell, wherein the non-host cell rRNA is encoded by a nucleic acid sequence comprising both rRNA coding sequences and intergenic sequences, the method comprising replacing the intergenic sequences of the nucleic acid sequence comprising both rRNA coding sequences and intergenic sequences with intergenic sequences of the host cell, thereby increasing the activity and/or improving the maturation of the non-host cell rRNA in the host cell.

2. The method of claim 1, wherein the host cell is Escherichia coli, optionally an E. coli strain comprising a genomic deletion for rRNA sequences, optionally further comprising a counter-selectable plasmid comprising E. coli rRNA sequences, optionally wherein the E. coli strain is SQ171.

3. The method of claim 2, wherein the non-host cell is selected from the group consisting of Mycobacterium tuberculosis, Bifidobacterium longum, Veillonella parvula, Clostridium difficile, Bacillus subtilis, Staphylococcus aureus, Enterococcus faecium, Enterococcus faecalis, Bacteroides thetaiotaomicron, Helicobacter pylori, Desulfovibrio bastinii, Desulfovibrio vulgaris, Rickettsia parkeri, Rhodopseudomonas palustris, Caulobacter crescentus, Mariprofundus ferrooxydans, Ghiorsea bivora, Neisseria gonorrhoeae, Burkholderia cenocepacia, Bordetella pertussis, Alcaligenes faecalis, Acinetobacter baumannii, Pseudomonas aeruginosa, Marinospirillum minutulum, Alteromonas macleodii, Vibrio cholerae, Providencia stuartii, Proteus mirabilis, Serratia marcescens, Edwardsiella tarda, Enterobacter cloacae, Klebsiella oxytoca, Klebsiella pneumoniae, Klebsiella aerogenes, Citrobacter freundii, Salmonella enterica and Shigella spp. (e.g., Shigella flexneri, Shigella dysenteriae, Shigella sonnei, Shigella boydii).

4. The method of claim 2, wherein the non-host cell is a commensal microbe, optionally wherein the commensal microbe is of a phylum or phyla selected from the group consisting of Firmicutes, Bacteroidetes, Bifidobacteria, Eubacteria, Ruminococcus, Lactobacillus, Peptococcus, Proteobacteria, Verrumicrobia, Actinobacteria, Fusobacteria, and Cyanobacteria, and a combination of phyla thereof.

5. The method of claim 1, wherein the host cell is Bacillus subtilis, optionally a B. subtilis strain comprising a genomic deletion for rRNA sequences, optionally further comprising a counter-selectable plasmid comprising B. subtilis rRNA sequences.

6. The method of claim 5, wherein the non-host cell is selected from the group consisting of Mycobacterium tuberculosis, Bifidobacterium longum, Veillonella parvula, Clostridium difficile, Escherichia coli, Staphylococcus aureus, Enterococcus faecium, Enterococcus faecalis, Bacteroides thetaiotaomicron, Helicobacter pylori, Desulfovibrio bastinii, Desulfovibrio vulgaris, Rickettsia parkeri, Rhodopseudomonas palustris, Caulobacter crescentus, Mariprofundus ferrooxydans, Ghiorsea bivora, Neisseria gonorrhoeae, Burkholderia cenocepacia, Bordetella pertussis, Alcaligenes faecalis, Acinetobacter baumannii, Pseudomonas aeruginosa, Marinospirillum minutulum, Alteromonas macleodii, Vibrio cholerae, Providencia stuartii, Proteus mirabilis, Serratia marcescens, Edwardsiella tarda, Enterobacter cloacae, Klebsiella oxytoca, Klebsiella pneumoniae, Klebsiella aerogenes, Citrobacter freundii, Salmonella enterica and Shigella spp. (e.g., Shigella flexneri, Shigella dysenteriae, Shigella sonnei, Shigella boydii).

7. The method of claim 5, wherein the non-host cell is a commensal microbe, optionally wherein the commensal microbe is of a phylum or phyla selected from the group consisting of Firmicutes, Bacteroidetes, Bifidobacteria, Eubacteria, Ruminococcus, Lactobacillus, Peptococcus, Proteobacteria, Verrumicrobia, Actinobacteria, Fusobacteria, and Cyanobacteria, and a combination of phyla thereof.

8. The method of claim 2, wherein the non-host cell is selected from the group consisting of Yersinia pestis, Yersinia pseudotuberculosis, Yersinia enterocolitica, Mycobacterium bovis, Mycobacterium avium, Neisseria meningitidis, Listeria monocytogenes, Streptococcus pyogenes, Campylobacter jejuni, Bacteroides fragilis, Proteus vulgaris and Haemophilus influenza.

9. The method of claim 1, wherein the nucleic acid sequence comprising both rRNA coding sequences and intergenic sequences comprises non-host cell 165, 23S and 5S rRNA sequences, optionally wherein the non-host cell 165, 23S and 5S rRNA sequences are under the control of an inducible promoter, optionally wherein the inducible promoter is an aTc-inducible promoter or an IPTG-inducible promoter.

10. The method of claim 9, wherein the host cell comprises a nucleic acid sequence comprising an orthogonal-ribosome binding site (o-RBS) positioned upstream of a reporter sequence,
optionally wherein the reporter sequence is a gene encoding a fluorescent protein, optionally wherein the fluorescent protein is selected from the group consisting of Sirius fluorescent protein, mTagBFP2, a blue fluorescent protein (BFP), Sapphire fluorescent protein, mCerulean, a yellow fluorescent protein (YFP), LSS-mKate2, MiCy, a green fluorescent protein (GFP) (optionally, a superfolder green fluorescent protein (sfGFP)), mEmerald, Venus, mPapaya, mScarlet-1, mCherry, mRFP, Katushka-9-5, mCarmine, mMaroon1, and E2-Crimson, or optionally wherein the reporter sequence is a gene encoding a chemiluminescent protein, optionally a luciferase protein, and
optionally wherein the nucleic acid sequence comprising an o-RBS positioned upstream of a reporter sequence is under the control of an inducible promoter, optionally wherein the inducible promoter is an IPTG-inducible promoter or an aTc-inducible promoter, optionally wherein the aTc-inducible promoter is a PLtetO-1 or a PtetA promoter.

11. The method of claim 10, wherein the nucleic acid sequence comprising both rRNA coding sequences and intergenic sequences comprises a non-host cell 16S rRNA sequence further comprising an o-antiRBS sequence.

12. The method of claim 1, wherein non-host cell rRNA activity is increased to 50% or more of the level of an appropriate host cell rRNA control.

13. The method of claim 1, wherein growth of the host cell is improved.

14. A composition selected from the group consisting of:
A nucleic acid sequence comprising an aTc-inducible promoter and 16S, 23S and 5S rRNA coding sequences, wherein the 16S sequence further comprises an o-antiRBS sequence;
A rRNA reporter system comprising:
(a) a first nucleic acid sequence comprising an aTc-inducible promoter and 16S, 23S and 5S rRNA coding sequences, wherein the 16S sequence further comprises an o-antiRBS sequence; and
(b) a second nucleic acid sequence comprising an o-RBS sequence and a reporter sequence;
A host cell comprising a nucleic acid sequence comprising non-host cell 16S, 23S and 5S rRNA coding sequences, wherein the non-host cell is selected from the group consisting of Mycobacterium tuberculosis, Bifidobacterium longum, Veillonella parvula, Clostridium difficile, Bacillus subtilis, Staphylococcus aureus, Enterococcus faecium, Enterococcus faecalis, Bacteroides thetaiotaomicron, Helicobacter pylori, Desulfovibrio bastinii, Desulfovibrio vulgaris, Rickettsia parkeri, Rhodopseudomonas palustris, Caulobacter crescentus, Mariprofundus ferrooxydans, Ghiorsea bivora, Neisseria gonorrhoeae, Burkholderia cenocepacia, Bordetella pertussis, Alcaligenes faecalis, Acinetobacter baumannii, Pseudomonas aeruginosa, Marinospirillum minutulum, Alteromonas macleodii, Vibrio cholerae, Providencia stuartii, Proteus mirabilis, Serratia marcescens, Edwardsiella tarda, Enterobacter cloacae, Klebsiella oxytoca, Klebsiella pneumoniae, Klebsiella aerogenes, Citrobacter freundii and Shigella spp. (e.g., Shigella flexneri, Shigella dysenteriae, Shigella sonnei, Shigella boydii);
A host cell comprising a nucleic acid sequence comprising non-host cell 16S, 23S and 5S rRNA coding sequences, wherein the non-host cell is a commensal microbe, optionally wherein the commensal microbe is of a phylum or phyla selected from the group consisting of Firmicutes, Bacteroidetes, Bifidobacteria, Eubacteria, Ruminococcus, Lactobacillus, Peptococcus, Proteobacteria, Verrumicrobia, Actinobacteria, Fusobacteria, and Cyanobacteria, and a combination of phyla thereof;
An E. coli cell comprising mutated forms of 23S rRNA genes rrlA, rrlB, rrlC, rrlD, rrlE, rrlG and rrlH; and
A nucleic acid sequence comprising a sequence comprising an o-antiRBS sequence operably linked to a sfGFP sequence having a 5′ and a 3′ end, wherein the 3′ end of the sfGFP sequence is attached to the 5′ end of a reporter nucleic acid sequence having a 5′ and a 3′ end.

15. (canceled)

16. The composition of claim 14, wherein:
the second nucleic acid sequence of the rRNA reporter system comprises an inducible promoter, optionally wherein the inducible promoter is an IPTG-inducible promoter;
the reporter sequence of the rRNA reporter system encodes a protein selected from the group consisting of Sirius fluorescent protein, mTagBFP2, a blue fluorescent protein (BFP), Sapphire fluorescent protein, mCerulean, a yellow fluorescent protein (YFP), LSS-mKate2, MiCy, a green fluorescent protein (GFP), mEmerald, Venus, mPapaya, mScarlet-1, mCherry, mRFP, Katushka-9-5, mCarmine, mMaroon1, E2-Crimson, and luciferase protein;
the aTc-inducible promoter of the rRNA reporter system is a PLtetO-1 or a PtetA promoter;
the rRNA reporter system further comprises a third nucleic acid sequence encoding for S20, S16, S1 and/or S15 r-protein(s);
the 16S, 23S and 5S rRNA coding sequences of the rRNA reporter system are non-E. coli sequences, optionally wherein the first nucleic acid sequence further comprises intergenic sequences, optionally wherein the intergenic sequences are E. coli intergenic sequences;
the rRNA reporter system further comprises a third nucleic acid sequence encoding for non-E. coli S20, S16, S1 and/or S15 r-protein(s) of the same organism as the non-E. coli 16S, 23S and 5S rRNA coding sequences;
in the host cell, the nucleic acid sequence comprising non-host cell 16S, 23S and 5S rRNA coding sequences further comprises intergenic sequences, optionally wherein the intergenic sequences are host cell intergenic sequences;
in the host cell, the non-host cell 16S rRNA sequence further comprises an o-antiRBS sequence;
the host cell further comprises a nucleic acid sequence encoding for S20, S16, S1 and/or S15 r-protein(s) of the non-host cell;
the host cell further comprises a nucleic acid sequence comprising an orthogonal-ribosome binding site (o-RBS) positioned upstream of a reporter sequence, optionally wherein the reporter sequence is a gene encoding a fluorescent protein, optionally wherein the fluorescent protein is selected from the group consisting of Sirius fluorescent protein, mTagBFP2, a blue fluorescent protein (BFP), Sapphire fluorescent protein, mCerulean, a yellow fluorescent protein (YFP), LSS-mKate2, MiCy, a green fluorescent protein (GFP) (optionally, a superfolder green fluorescent protein (sfGFP)), mEmerald, Venus, mPapaya, mScarlet-1, mCherry, mRFP, Katushka-9-5, mCarmine, mMaroon1, and E2-Crimson, or optionally wherein the reporter sequence is a gene encoding a chemiluminescent protein, optionally a luciferase protein, optionally wherein the nucleic acid sequence comprising an o-RBS positioned upstream of a reporter sequence is under the control of an inducible promoter, optionally wherein the inducible promoter is an IPTG-inducible promoter or an aTc-inducible promoter, optionally wherein the aTc-inducible promoter is a PLtetO-1 or a PtetA promoter;
the E. coli cell further comprises a sfGFP reporter;
at least one 23S rRNA gene of the E. coli cell is selected from the group consisting of rrlA, rrlB, rrlC, rrlD, rrlE, rrlG and rrlH comprises an A2058U mutation;
the E. coli cell is erythromycin-resistant;
the E. coli cell further comprises an orthogonal large subunit (LSU) ribosome and/or an orthogonal small subunit (SSU) ribosome;
the sfGFP sequence comprises a sequence encoding for SEQ ID NO: 409 (N-MSKGEELFTG-C), optionally wherein the sfGFP sequence comprises SEQ ID NO: 408 (5′-ATGAGCAAAGGTGAAGAACTGTTTACCGGC-3′);
the sfGFP sequence consists of a sequence encoding for SEQ ID NO: 409 (N-MSKGEELFTG-C), optionally wherein the sfGFP sequence consists of SEQ ID NO: 408 (5′-ATGAGCAAAGGTGAAGAACTGTTTACCGGC-3′);
the reporter nucleic acid sequence encodes a fluorescent protein, optionally wherein the fluorescent protein is selected from the group consisting of Sirius fluorescent protein, mTagBFP2, a blue fluorescent protein (BFP), Sapphire fluorescent protein, mCerulean, a yellow fluorescent protein (YFP), LSS-mKate2, MiCy, a green fluorescent protein (GFP) (optionally, a superfolder green fluorescent protein (sfGFP)), mEmerald, Venus, mPapaya, mScarlet-1, mCherry, mRFP, Katushka-9-5, mCarmine, mMaroon1, and E2-Crimson; and/or
the reporter nucleic acid sequence encodes a chemiluminescent protein, optionally a luciferase protein.

17-27. (canceled)

28. A method selected from the group consisting of:
A method for increasing the activity of a non-host cell ribosomal RNA (rRNA) in a host cell, the method comprising introducing a nucleic acid sequence encoding for S20 and/or S16 r-protein(s) of the non-host cell into the host cell, thereby increasing the activity of the non-host cell rRNA in the host cell;
A method for identifying a compound capable of modulating the rRNA activity of a pathogenic microbe in a host cell comprising (i) a rRNA reporter system comprising a first nucleic acid sequence comprising 16S, 23S and 5S rRNA coding sequences, wherein the 16S sequence further comprises an o-antiRBS sequence; and (ii) a second nucleic acid sequence comprising an o-RBS sequence and a reporter sequence, the method comprising:
(a) contacting the host cell with a test compound; and
(b) measuring modulation of the reporter sequence in the presence of the test compound, as compared to an appropriate control,
thereby identifying the test compound as a compound capable of modulating the rRNA activity of a pathogenic microbe in the host cell;
A method for identifying a compound that does not modulate or only weakly modulates (as compared to a pathogenic microbe) the rRNA activity of a commensal microbe in a host cell comprising (i) a rRNA reporter system comprising a first nucleic acid sequence comprising 16S, 23S and 5S rRNA coding sequences, wherein the 16S sequence further comprises an o-antiRBS sequence; and (ii) a second nucleic acid sequence comprising an o-RBS sequence and a reporter sequence, the method comprising:
(a) contacting the host cell with a test compound; and
(b) measuring modulation of the reporter sequence in the presence of the test compound, as compared to an appropriate control,
thereby identifying the test compound as a compound that does not modulate or only weakly modulates (as compared to a pathogenic microbe) the rRNA activity of the commensal microbe in the host cell;
A method for identifying association between an orthogonal SSU and a host cell LSU, the method comprising:
contacting the E. coli cell of claim 58 comprising a host cell LSU with a nucleic acid sequence that encodes for an orthogonal SSU capable of being expressed in the E. coli cell,
contacting the E. coli cell comprising the orthogonal SSU with erythromycin; and
observing the erythromycin sensitivity of the E. coli cell comprising the orthogonal SSU, wherein:
erythromycin sensitivity of the E. coli cell comprising the orthogonal SSU indicates high levels of exchange between the orthogonal SSU and the host cell LSU; and
erythromycin resistance of the E. coli cell comprising the orthogonal SSU indicates low levels of exchange between the orthogonal SSU and the host cell LSU (i.e., the orthogonal SSU preferentially associates with the host cell LSU),
thereby identifying association between the orthogonal SSU and the host cell LSU; and
A method for enhancing translation in a host cell of an orthogonal nucleic acid comprising a reporter sequence, wherein the reporter sequence has a 5′ end and a 3′ end, the method comprising attaching a sfGFP sequence at the 5′ end of the reporter sequence, thereby enhancing translation of the orthogonal nucleic acid sequence in the host cell.

29. The method of claim 28, wherein:
the method further comprises introducing a nucleic acid sequence encoding for S1 and/or S15 r-protein(s) of the non-host cell into the host cell;
the host cell is Escherichia coli, optionally an E. coli strain comprising a genomic deletion for rRNA sequences, optionally further comprising a counter-selectable plasmid comprising E. coli rRNA sequences, optionally wherein the E. coli strain is SQ171;
the non-host cell is selected from the group consisting of Mycobacterium tuberculosis, Bifidobacterium longum, Veillonella parvula, Clostridium difficile, Bacillus subtilis, Staphylococcus aureus, Enterococcus faecium, Enterococcus faecalis, Bacteroides thetaiotaomicron, Helicobacter pylori, Desulfovibrio bastinii, Desulfovibrio vulgaris, Rickettsia parkeri, Rhodopseudomonas palustris, Caulobacter crescentus, Mariprofundus ferrooxydans, Ghiorsea bivora, Neisseria gonorrhoeae, Burkholderia cenocepacia, Bordetella pertussis, Alcaligenes faecalis, Acinetobacter baumannii, Pseudomonas aeruginosa, Marinospirillum minutulum, Alteromonas macleodii, Vibrio cholerae, Providencia stuartii, Proteus mirabilis, Serratia marcescens, Edwardsiella tarda, Enterobacter cloacae, Klebsiella oxytoca, Klebsiella pneumoniae, Klebsiella aerogenes, Citrobacter freundii, Salmonella enterica, Yersinia pestis, Yersinia pseudotuberculosis, Yersinia enterocolitica, Mycobacterium bovis, Mycobacterium avium, Neisseria meningitidis, Listeria monocytogenes, Streptococcus pyogenes, Campylobacter jejuni, Bacteroides fragilis, Proteus vulgaris, Haemophilus influenza and Shigella spp. (e.g. Shigella flexneri, Shigella dysenteriae, Shigella sonnei, Shigella boydii), or the non-host cell is a commensal microbe, optionally wherein the commensal microbe is of a phylum or phyla selected from the group consisting of Firmicutes, Bacteroidetes, Bifidobacteria, Eubacteria, Ruminococcus, Lactobacillus, Peptococcus, Proteobacteria, Verrumicrobia, Actinobacteria, Fusobacteria, and Cyanobacteria, and a combination of phyla thereof;
the host cell is Bacillus subtilis, optionally a B. subtilis strain comprising a genomic deletion for rRNA sequences, optionally further comprising a counter-selectable plasmid comprising B. subtilis rRNA sequences;
the non-host cell is A. baumannii and the nucleic acid sequence encodes for AbS20 and/or AbS16 r-protein(s);
the non-host cell is A. macleodii and the nucleic acid sequence encodes for AmS20 and AmS16 r-proteins, optionally wherein the nucleic acid sequence further encodes for AmS1 and/or AmS15 r-protein(s);
the non-host cell is V. cholerae or M. minitulum and the nucleic acid sequence encodes for S20, S16, S1 and S15 r-proteins of the non-host cell;
the non-host cell is P. aeruginosa and the nucleic acid sequence encodes for PaS16 and PaS20 r-proteins, optionally wherein the nucleic acid sequence further encodes for PaS1 and/or PaS15 r-protein(s);
the non-host cell is selected from the group consisting of A. faecalis, B. cenocepacia, N. gonnorrheae, M. ferrooxydans, and C. crescentus and the nucleic acid sequence encodes for non-host cell S16 and S20 r-proteins;
the nucleic acid sequence encoding for S20 and/or S16 r-proteins of the non-host cell is under the control of a copy-up variant, optionally RepA E93K or E93R;
the host cell further comprises an o-RBS reporter construct, optionally wherein the reporter of the o-RBS reporter construct is under control of a PLtetO-1 or a PtetA promoter
a nucleic acid sequence comprising non-host cell 165, 23S and 5S rRNA sequences expresses the non-host cell rRNA in the host cell, optionally wherein the non-host cell 165, 23S and 5S rRNA sequences are under the control of an inducible promoter, optionally wherein the inducible promoter is an aTc-inducible promoter or an IPTG-inducible promoter, optionally wherein the host cell comprises a nucleic acid sequence comprising an orthogonal-ribosome binding site (o-RBS) positioned upstream of a reporter sequence, optionally wherein the reporter sequence is a gene encoding a fluorescent protein, optionally wherein the fluorescent protein is selected from the group consisting of Sirius fluorescent protein, mTagBFP2, a blue fluorescent protein (BFP), Sapphire fluorescent protein, mCerulean, a yellow fluorescent protein (YFP), LSS-mKate2, MiCy, a green fluorescent protein (GFP) (optionally, a superfolder green fluorescent protein (sfGFP)), mEmerald, Venus, mPapaya, mScarlet-1, mCherry, mRFP, Katushka-9-5, mCarmine, mMaroon1, and E2-Crimson, or optionally wherein the reporter sequence is a gene encoding a chemiluminescent protein, optionally a luciferase protein, and optionally wherein the nucleic acid sequence comprising an o-RBS positioned upstream of a reporter sequence is under the control of an inducible promoter, optionally wherein the inducible promoter is an IPTG-inducible promoter or an aTc-inducible promoter, optionally wherein the aTc-inducible promoter is a PLtetO-1 or a PtetA promoter; or optionally wherein the nucleic acid sequence comprising non-host cell 16S, 23S and 5S rRNA sequences comprises a non-host cell 16S rRNA sequence further comprising an o-antiRBS sequence;
non-host cell rRNA activity is increased to 50% or more of the level of an appropriate host cell rRNA control;
growth of the host cell is improved;
the test compound reduces pathogenic microbe rRNA activity;
test compound, when administered to the pathogenic microbe, reduces growth of the pathogenic microbe;
the test compound is a small molecule;
the host cell further comprises a nucleic acid sequence encoding for S20, S16, S1 and/or S15 r-protein(s) of the pathogenic microbe;
the first nucleic acid sequence comprising 16S, 23S and 5S rRNA coding sequences further comprises intergenic sequences, optionally wherein the intergenic sequences are host cell intergenic sequences;
the test compound selectively modulates the rRNA activity of the pathogenic microbe in the host cell, as compared to modulation of rRNA activity of a commensal microbe in the host cell, optionally wherein ribosomal components of the pathogenic microbe and the commensal microbe are multiplexed within the host cell;
the sfGFP sequence comprises a sequence encoding for SEQ ID NO: 409 (N-MSKGEELFTG-C), optionally wherein the sfGFP sequence comprises SEQ ID NO: 408 (5′-ATGAGCAAAGGTGAAGAACTGTTTACCGGC-3′); and/or
the sfGFP sequence consists of a sequence encoding for SEQ ID NO: 409 (N-MSKGEELFTG-C), optionally wherein the sfGFP sequence consists of SEQ ID NO: 408 (5′-ATGAGCAAAGGTGAAGAACTGTTTACCGGC-3′).

30-71. (canceled)
